(19) United States
(12) Patent Application Publication
(10) Pub. No.: US 2013/0217592 A1
(43) Pub. Date: Aug. 22, 2013

(54) ARRAYS AND METHODS COMPRISING M. SMITHII GENE PRODUCTS

(71) Applicant: The Washington University, (US)

(72) Inventors: Buck Sparrow Samuel, St. Louis, MO (US); Elizabeth E. Hansen, St. Louis, MO (US); Jeffrey I. Gordon, St. Louis, MO (US)

(73) Assignee: THE WASHINGTON UNIVERSITY, St. Louis, MO (US)

(21) Appl. No.: 13/764,427

(22) Filed: Feb. 11, 2013

Related U.S. Application Data
(63) Continuation-in-part of application No. 12/627,961, filed on Nov. 30, 2009, now abandoned.
Application No. 12/627,961 is a continuation-in-part of application No. PCT/US2008/065344, filed on May 30, 2008.
(60) Provisional application No. 60/932,457, filed on May 31, 2007.

(51) Int. Cl. C12N 15/10

(52) U.S. Cl. CPC C12N 15/1086
USPC 506/10; 506/17; 506/18

(57) ABSTRACT

The present invention encompasses arrays and methods related to the genome of M. smithii.

### CROSS REFERENCE TO RELATED APPLICATIONS

[0001] This application is a continuation-in-part of U.S. application Ser. No. 12/627,961, filed on Nov. 30, 2008, which is a continuation-in-part of application No. PCT/US2008/065344, filed on May 30, 2008, which claims the priority of U.S. provisional application No. 60/932,457, filed on May 31, 2007, each of which is hereby incorporated by reference in its entirety.

### GOVERNMENTAL RIGHTS

[0002] This invention was made with government support under Grant numbers DK30292 and DK70077 awarded by the National Institutes of Health. The government has certain rights in the invention.

### FIELD OF THE INVENTION

[0003] The present invention encompasses arrays and methods related to the genome of M. smithii.

### BACKGROUND OF THE INVENTION

### I. Weight Problems and Current Approaches

[0004] According to the Center for Disease Control (CDC), over sixty percent of the United States population is overweight, and almost twenty percent are obese. This translates into 38.8 million adults in the United States with a Body Mass Index (BMI) of 30 or above. Obesity is also a world-wide health problem with an estimated 500 million overweight adult humans [body mass index (BMI) of 25.0-29.9 kg/m²] and 250 million obese adults. This epidemic of obesity is leading to worldwide increases in the prevalence of obesity-related disorders, such as diabetes, hypertension, as well as cardiac pathology, and non-alcoholic fatty liver disease (NAFLD).

[0005] According to the National Institute of Diabetes, Digestive and Kidney Diseases (NIDDK) approximately 280,000 deaths annually are directly related to obesity. The NIDDK further estimated that the direct cost of healthcare in the U.S. associated with obesity is $51 billion. In addition, Americans spend $33 billion per year on weight loss products. In spite of this economic cost and consumer commitment, the prevalence of obesity continues to rise at alarming rates. From 1991 to 2000, obesity in the U.S. grew by 61%.

[0006] Additionally, malnourishment or disease may lead to individuals being under weight. The World Health Organization estimates that one-third of the world is under-fed and one-third is starving. Over 4 million will die this year from malnourishment. One in twelve people worldwide is malnourished, including 160 million children under the age of 5.

### II. Gastrointestinal Microbiota

[0007] Humans are host to a diverse and dynamic population of microbial symbionts, with the majority residing within the distal intestine. The gut microbiota contains representatives from ten known divisions of the domain Bacteria, with an estimated 500-1000 species-level phylogenetic types present in a given healthy adult human; the microbiota is dominated by members of two divisions of Bacteria, the Bacteroidetes and the Firmicutes. Members of the domain Archaea are also represented, most prominently by a methanogenic Euryarchaeote, Methanobrevibacter smithii and occasionally Methanosphaera stadtmanae. The density of colonization increases by eight orders of magnitude from the proximal small intestine (10³) to the colon (10¹¹). The distal intestine is an anoxic bioreactor whose microbial constituents help the subject by providing a number of key functions: e.g., breakdown of otherwise indigestible plant polysaccharides and regulating subject storage of the extracted energy; biotransformation of conjugated bile acids and xenobiotics; degradation of dietary oxalates; synthesis of essential vitamins; and education of the immune system.

[0008] Dietary fiber is a key source of nutrients for the microbiota. Monosaccharides are absorbed in the proximal intestine, leaving dietary fiber that has escaped digestion (e.g. resistant starches, fructans, cellulose, hemicelluloses, pectins) as the primary carbon sources for microbial members of the distal gut. Fermentation of these polysaccharides yields short-chain fatty acids (SCFAs; mainly acetate, butyrate and propionate) and gases (H₂ and CO₂). These end products benefit humans. For example, SCFAs are an important source of energy, as they are readily absorbed from the gut lumen and are subsequently metabolized in the colonic mucosa, liver, and a variety of peripheral tissues (e.g., muscle). SCFAs also stimulate colonic blood flow and the uptake of electrolytes and water.

### III. Methanogens

[0009] Methanogens are members of the domain Archaea. Methanogens thrive in many anaerobic environments together with fermentative bacteria. These habitats include natural wetlands as well as man-made environments, such as sewage digesters, landfills, and bioreactors. Hydrogen-consuming, mesophilic methanogens are also present in the intestinal tracts of many invertebrate and vertebrate species, including termites, birds, cows, and humans. Using methane breath tests, clinical studies estimate that between 50 and 80 percent of humans harbor methanogens.

[0010] Culture- and non-culture-based enumeration studies have demonstrated that members of the Methanobrevibacter genus are prominent gut mesophilic methanogens. The most comprehensive enumeration of the adult human colonic microbiota reported to date found a single predominant archaeal species, Methanobrevibacter smithii. This gram-positive-staining Euryarchaeote can comprise up to 10¹⁰ cells/g feces in healthy humans, or ˜10% of all anaerobes in the colons of healthy adults.

[0011] A focused set of nutrients are consumed for energy by methanogens: primarily H₂/CO₂, formate, acetate, but also methanol, ethanol, methylated sulfur compounds, methylated amines and pyruvate. These compounds are typically converted to CO₂ and methane (e.g. acetate) or reduced with H₂ to methane alone (e.g. methanol or CO₂). Some methanogens are restricted to utilizing only H₂/CO₂ (e.g. Methanobrevibacter arbophilicus), or methanol (e.g. Methanospaera stadtmanae). Other more ubiquitous methanogens exhibit greater metabolic diversity, like Methanosarcina species. In vitro studies suggest that M. smithii is intermediate in this metabolic spectrum, consuming H₂/CO₂ and formate as energy sources.

### IV. Anaerobic Microbial Fermentation in the Mammalian Intestine

[0012] Fermentation of dietary fiber is accomplished by syntrophic interactions between microbes linked in a metabolic food web, and is a major energy-producing pathway for members of the Bacteroidetes and the Firmicutes. Bacteroides thetaiotaomicron has previously been used as a model bacterial symbiont for a variety of reasons: (i) it effectively ferments a range of otherwise indigestible plant polysaccharides in the human colon; (ii) it is genetically manipulatable; and, (iii) it is a predominant member of the human distal intestinal microbiota. Its 6.26 Mb genome has been sequenced: the results reveal that B. thetaiotaomicron has the largest collection of known or predicted glycoside hydrolases of any prokaryote sequenced to date (226 in total; by comparison, our human genome only encodes 98 known or predicted glycoside hydrolases). B. thetaiotaomicron also has a significant expansion of outer membrane polysaccharide binding and importing proteins (over 200 paralogs of two starch binding proteins known as SusC and SusD), as well as a large repertoire of environmental sensing proteins [e.g. 50 extra-cytoplasmic function (ECF)-type sigma factors; 25 anti-sigma factors, and 32 novel hybrid two-component systems]. Functional genomics studies of B. thetaiotaomicron in vitro and in the ceca of gnotobiotic mice, indicates that it is capable of very flexible foraging for dietary (and host-derived) polysaccharides, allowing this organism to have a broad niche and contributing to the functional stability of the microbiota in the face of changes in the diet.

[0013] In vitro biochemical studies of B. thetaiotaomicron and closely related Bacteroides species (B. fragilis and B. succinogenes) indicate that their major end products of fermentation are acetate, succinate, H₂ and CO₂. Small amounts of pyruvate, formate, lactate and propionate are also formed.

### V. Removal of Hydrogen from the Intestinal Ecosystem is Important for Efficient Microbial Fermentation

[0014] Anaerobic fermentation of sugars causes flux through glycolytic pathways, leading to accumulation of NADH (via glyceraldehyde-3P dehydrogenase) and the reduced form of ferredoxin (via pyruvate:ferredoxin oxidoreductase). B. thetaiotaomicron is able to couple NAD⁺ recovery to reduction of pyruvate to succinate (via malate dehydrogenase and fumarase reductase), or lactate (via lactate dehydrogenase). Oxidation of reduced ferredoxin is easily coupled to production of H₂. However, H₂ formation is, in principle, not energetically feasible at high partial pressures of the gas. In other words, lower partial pressures of H₂ (1-10 Pa) allow for more complete oxidation of carbohydrate substrates. The subject removes some hydrogen from the colon by excretion of the gas in the breath and as flatus. However, the primary mechanism for eliminating hydrogen is by interspecies transfer from bacteria by hydrogenotrophic methanogens. Formate and acetate can also be transferred between some species, but their transfer is complicated by their limited diffusion across the lipophilic membranes of the producer and consumer. In areas of high microbial density or aggregation like in the gut, interspecies transfer of hydrogen, formate and acetate is likely to increase with decreasing physical distance between microbes.

[0015] Methanogen-mediated removal of hydrogen can have a profound impact on bacterial metabolism. Not only does re-oxidation of NADH occur, but end products of fermentation undergo a shift from a mixture of acetate, formate, H₂, CO₂, succinate and other organic acids to predominantly acetate and methane with small amounts of succinate. This facilitates disposal of reducing equivalents, and produces a potential gain in ATP production due to increased acetate levels. For example, a reduction in hydrogen allows Clostridium butyricum to acquire 0.7 more ATP equivalents from fermentation of hexose sugars. Co-culture of M. smithii with a prominent cellulolytic ruminal bacterial species, Fibrobacter succinogenes S85, results in augmented fermentation, as manifested by increases in the rate of ATP production and organic acid concentrations. Co-culture of M. smithii association with Ruminococcus albus eliminates NADH-dependent ethanol production from acetyl-CoA, thereby skewing bacterial metabolism towards production of acetate, which is more energy yielding. H₂-producing fibrolytic bacterial strains from the human colon exhibit distinct cellulose degradation phenotypes when co-cultured with M. smithii, indicating that some bacteria are more responsive to syntrophy with methanogens.

[0016] While there is suggestive evidence that methanogens cooperate metabolically with members of Bacteroides, studies have not elucidated the impact of this relationship on a subject's energy storage or on the specificity and efficiency of carbohydrate metabolism. Colonization of adult germ-free mice with M. smithii and/or B. thetaiotaomicron revealed that the methanogen increased the efficiency and changed the specificity of bacterial digestion of dietary glycans. Moreover, co-colonized mice exhibited a significantly greater increase in adiposity compared with mice colonized with either organism alone.

### SUMMARY OF THE INVENTION

[0017] One aspect of the present invention encompasses an array. The array comprises a substrate having disposed thereon at least one nucleic acid, wherein the nucleic acid comprises a nucleic acid sequence selected from the nucleic acid sequences listed in Table A.

[0018] Another aspect of the present invention encompasses an array. The array comprises a substrate having disposed thereon at least one polypeptide, wherein the polypeptide is encoded by a nucleic acid sequence selected from the nucleic acid sequences listed in Table A.

[0019] Yet another aspect of the present invention encompasses an array. The array comprises a substrate having diposed thereon at least one nucleic add encoding an adhesin-like protein, wherein the nucleic acid comprises a nucleic acid sequence selected from group consisting of SEQ ID NO: 1, 3, 5, 7, 9, 11, 13, 15, 17, 19, 21, 23, 25, 27, 29, 31, 33, 35, 37, 39, 41, 43, 45, 47, 49, 51, 53, 55, 57, 59, 61, 63, 65, 67, 69, 71, 73, 75, 77, 79, 81, 83, 85, 87, 89, 91, 93, and 95.

[0020] Yet another aspect of the present invention encompasses an array. The array comprises a substrate having diposed thereon at least one nucleic acid encoding an adhesin-like protein, wherein the nucleic acid comprises a nucleic acid sequence selected from group consisting of SEQ ID NOs: 1, 3, 5, 7, 9, 11, 13, 15, 17, 19, 21, 23, 25, 27, 29, 31, 33, 35, 37, 39, 41, 43, 45, 47, 49, 51, 53, 55, 57, 59, 61, 63, 65, 67, 69, 71, 73, 75, 77, 79, 81, 83, 85, 87, 89, 91, 93, and 95. In addition, the array further comprises at least one nucleic acid sequence selected from the group consisting of SEQ ID NOs: 97-2140

[0021] Yet another aspect of the present invention encompasses an array. The array comprises a substrate having disposed thereon at least one polypeptide, wherein the polypeptide is encoded by a nucleic acid sequence selected from group consisting of SEQ ID NO: 1, 3, 5, 7, 9, 11, 13, 15, 17, 19, 21, 23, 25, 27, 29, 31, 33, 35, 37, 39, 41, 43, 45, 47, 49, 51, 53, 55, 57, 59, 61, 63, 65, 67, 69, 71, 73, 75, 77, 79, 81, 83, 85, 87, 89, 91, 93, and 95.

[0022] Yet another aspect of the present invention encompasses an array. The array comprises a substrated having disposed thereon at least one polypeptide, wherein the polypeptide comprises at least one amino acid sequence selected from the group consisting of SEQ ID NO: 2, 4, 6, 8, 10, 12, 14, 16, 18, 20, 22, 24, 26, 28, 30, 32, 34, 36, 38, 40, 42, 44, 46, 48, 50, 52, 54, 56, 58, 60, 62, 64, 66, 68, 70, 72, 74, 76, 78, 80, 82, 84, 86, 88, 90, 92, 94, and 96.

[0023] Yet another aspect of the present invention encompasses an array. The array comprises a substrate having disposed thereon at least one polypeptide, wherein the polypeptide is encoded by a nucleic acid sequence selected from group consisting of SEQ ID NOs: 97-2140.

[0024] Yet another aspect of the present invention encompaases a method of selecting a compound that has efficacy for modulating a gene product of M. smithii present in the gastrointestinal tract of a subject, wherein the gene product correlates with a biomolecule selected from the group consisting of SEQ ID NOs: 1-96. The method comprises comparing a plurality of biomolecules from M. smithii before and after administration of a compound for modulating a gene product of M. smithii, such that if the abundance of a biomolecule that correlates with the gene product is modulated, the compound is efficacious in modulating a gene product of M. smithii, and selecting a compound that modulates a M. smithii gene product.

[0025] Yet another aspect of the present invention encompasses a method of selecting a compound that has efficacy for modulating a gene product of M. smithii present in the gastrointestinal tract of a subject. The method comprises comparing an M. smithii gene profile to a gene profile of the subject, identifying a gene product of the M. smithii gene profile that is divergent from a corresponding gene product of the subject gene profile, or absent in the gene profile of the subject, and selecing a compound that modulates the M. smithii gene product but does not substantially modulate the corresponding divergent gene product of the subject.

[0026] Still another aspect of the invention encompasses a method for modulating a gene product of M. smithii present in the gastrointestinal tract of a subject. The method comprises administering to the subject an HMG-CoA reductase inhibitor. The inhibitor may be formulated for release in the distal portion of the subject's gastrointestinal tract and thereby substantial inhibit more of the HMG-CoA reductase of M. smithii compared to the subject's HMG-CoA reductase.

[0027] Other aspects and iterations of the invention are described more thoroughly below.

### DESCRIPTION OF THE DRAWINGS

[0028] FIG. 1. depicts a micrograph and a graph illustrating that M. smithii produces glycans that mimic those produced by humans—(A) TEM of M. smithii harvested from the ceca of adult GF mice after a 14 day colonization. The inset shows a comparable study of stationary phase M. smithii recovered from a batch fermentor containing Methanobrevibacter complex medium (MBC). Note that the size of the capsule is greater in cells recovered from the cecum (open vs. closed arrow). (B) Comparison of glycosyltransferase (GT), glycosylhydrolase (GH) and carbohydrate esterase (CE) families (defined in CAZy; Table 10) represented in the genomes of the following sequenced methanogens (see Table 5): Msm, Methanobrevibacter smithii; Msp, Methanosphaera stadtmanae; Mth, Methanothermobacter thermoautotrophicus; Mac, Methanosarcina acetivorans; Mba, M. barkeri; Mma, M. mazei; Mmp, Methanococcus maripaludis; Mja, M. jannaschii; Mhu, Methanospirillum hungatei; Mbu, Methanococcoides burtonii; and Mka, Methanopyrus kandleri. Gut methanogens (highlighted in orange) have no GH or CE family members, but have a larger proportion of family 2 GTs (^{ψ}, p<0.00005 based on binomial test for enrichment vs. non-gut associated methanogens). Scale bar, 100 μm in panel A.

[0029] FIG. 2. depicts graphs and diagrams illustrating functional genomic and biochemical assays of M. smithii metabolism in the ceca of gnotobiotic mice. (A) In silico metabolic reconstructions of M. smithii pathways involved in (i) methanogenesis from formate, H₂/CO₂, and alcohols, (ii) carbon assimilation from acetate and bicarbonate, and (iii) nitrogen assimilation from ammonium. Abbreviations: Acs, acetyl-CoA synthase; Adh, alcohol dehydrogenase; Ags, 18 α-ketoglutarate synthase; AmtB, ammonium transporter; BtcA/B, bicarbonate (HCO₃) ABC transporter; Cab, carbonic anhydrase; CH₃, methyl; CoA, coenzyme A; CoB, coenzyme B; CoM, coenzyme M; COR, corrinoid; F₄₂₀, cofactor F₄₂₀; F₄₃₀, cofactor F₄₃₀; Fd, ferredoxin (ox-oxidized, red-reduced); FdhAB, formate dehydrogenase subunits; FdhC, formate transporter; Fno, F₄₂₀-dependent NADP reductase; Ftr, formylmethanofuran:tetrahydromethanopterin (H₄MPT) formyltransferase; Fum, fumarate hydratase; Fwd, tungsten formylmethanofuran dehydrogenase; GdhA, glutamate dehydrogenase; GInA, glutamine synthetase; GltA/B, glutamate synthase subunits A and B; Hmd, H₂-forming methylene-H₄MPT dehydrogenase; Kor, 2-oxoglutarate synthase; Mch, methenyl-H₄MPT cyclohydrolase; Mcr, methyl-CoM reductase; Mdh, malate dehydrogenase; MeOH, methanol; Mer, methylene-H₄MPT reductase; MFN, methanofuran; MtaB, methanol:cobalamin methyltransferase; Mtd, F₄₂₀-dependent methylene-H₄MPT dehydrogenase; Mtr, methyl-H₄MPT:CoM methyltransferase; NH4, ammonium; OA, oxaloacetate; PEP, phosphoenol pyruvate; Por, pyruvate:ferredoxin oxidoreductase; Pps, phosphoenolpyruvate synthase; PRPP, 5-phospho-a-D-ribosyl-1-pyrophosphate; Pyc, pyruvate carboxylase; RfaS, ribofuranosylaminobenzene 5′-phosphate (RFA-P) synthase; Sdh, succinate dehydrogenase; Suc, succinyl-CoA synthetase. Potential drug targets are noted (Rx). (B,C,G) qRT-PCR assays of the expression of key M. smithii (Ms) genes in gnotobiotic mice that do or do not harbor B. thetaiotaomicron (Bt)(n=5-6 animals/group; each sample assayed in triplicate; mean values±SEM plotted; see Table 11 for full list of analyses). Results are summarized in Panel A using the following color codes: red, upregulated; green, downregulated; grey, assayed but no significant change; black arrows, transcript not assayed. (D) Ethanol (EtOH) levels in the ceca of mice colonized with B. thetaiotaomicron±M. smithii (n=10-15 animals/group representing 3 independent experiments; each sample assayed in duplicate; mean values±SEM plotted). (E) Ratio of cecal concentrations of glutamine (Gln) and 2-oxoglutarate (2-OG) (n=5 animals/group; samples assayed in duplicate; mean values±SEM). (F) Cecal levels of free Gln (glutamine), Glu (glutamate) and Asn (asparagine) (n=5 animals/group; samples assayed in duplicate; mean values±SEM). (H) Cecal ammonium and urea levels measured in samples used for the assays shown in panels E and F. *, p<0.05; **, p<0.01; ***, p<0.005, according to Student's t-test.

[0030] FIG. 3. depicts a diagram of the analysis of the M. smithii pan-genome. Schematic depiction of the conservation of M. smithii PS genes [depicted in the outermost circle where the color code is orange for forward strand ORFs (F) and blue for reverse strand ORFs (R)] in (i) other M. smithii strains (GeneChip-based genotyping of strains Fi, ALI, and B181; circles in increasingly lighter shades of green, respectively), (ii) the fecal microbiomes of two healthy individuals [human gut microbiome (HGM), shown as the red plot in the fifth innermost circle with nucleotide identity plotted from 80% (closest to the purple circle) to 100% (closest to lightest green ring); see also FIG. 9 for details], and (iii) two other members of the Methanobacteriales division, M. stadtmanae (Msp; purple circle), another human gut methanogen, and M. thermoautotrophicus (Mth; yellow circle), an environmental thermophile [mutual best blastp hits (e-value<10⁻²⁰)]. Tick marks in the center of the Figure indicate nucleotide number in kbps. Asterisks denote the positions of ribosomal rRNA operons. Letters highlight distinguishing features among M. smithii genomes: the table below the figure summarizes differences in M. smithii gene content between strains F1, ALI, and B181 as well as the two human fecal metagenomic datasets.

[0031] FIG. 4. depicts two illustrations of the analysis of synteny between M. smithii and M. stadtmanae genomes. (A) Dot plot comparison. (B) Results obtained with the Artemis Comparison Tool (Carver et al., (2005) Bioinformatics 21:3422-3) set to tBLASTX and the most stringent confidence level (blue, forward strand; orange, reverse strand). The gut methanogens exhibit limited synteny.

[0032] FIG. 5. depicts an illustration of the predicted interaction network of M. smithii clusters of orthologous groups (COGs) based on STRING. Individual M. smithii COGs are represented by nodes (circles; 622 of the 1352 COGs in M. smithii's genome). Predicted interactions are represented by black lines (0.95 confidence interval; summary of 9,765 total predicted interactions are shown). COG conservation among the Methanobacteriales is denoted by node color: red, M. smithii alone; yellow, gut methanogens; green, M. smithii and M. thermoautotrophicus; and gray, all three genomes. Several clusters are highlighted: (A) molybdopterin biosynthesis (methanogenesis from CO₂); (B) ion transport; (C) DNA repair/recombination; (D) antimicrobial transport; (E) sialic acid synthesis; (F) amino acid transport system; (G) HMG-CoA reductase cluster; and (H) conserved archaeal membrane protein cluster. See Table 9 for lists of genes assigned to COGs.

[0033] FIG. 6. depicts an illustration, a graph, and a micrograph showing sialic acid production by M. smithii in vitro. (A) M. smithii gene cluster (MSM1535-40) encoding enzymes needed to synthesize sialic acid (N-acetylneuraminic acid; Neu5Ac): CapD, polysaccharide biosynthesis protein/sugar epimerase; DegT, pleiotropic regulatory protein/amidotransferase; NeuS, Neu5Ac cytidylyltransferase; NeuA, CMP-Neu5Ac synthetase; NeuB, Neu5Ac synthase; Gpd, glycerol-3-phosphate dehydrogenase. (B) Reverse phase-HPLC of derivatized M. smithii cell wall extracts. The position of elution of N-acetylneuraminic acid (Neu5Ac) and N-glycolylneuraminic acid (Neu5Gc) standards are shown. The concentration of Neu5Ac species of sialic acid in M. smithii cell walls, when the organism has been cultured in a batch fermentor for 6d in supplemented MBC medium (does not contain any sialic acid sources), is 410 pmol/g wet weight of cells (average of three assays). (C) Lectin staining with fluorescein-labeled SNA (Sambucus nigra agglutinin) shows that M. smithii F1 is decorated with Neu5Ac epitopes (counter stained with DAPI; X100 magnification). The specificity of lectin staining was assessed using E. coli K92 (positive control; sialic acid-producing), B. longum NCC2705 (negative control) and M. smithii cells with no lectin added (background autofluorescence control).

[0034] FIG. 7. depicts distinct complements of adhesin-like proteins in gut methanogens (A) A maximum likelihood tree of a CLUSTALW alignment of all adhesin-like proteins (ALPs) in M. smithii (47; red branches) and in M. stadtmanae (38; black branches). Each methanogen possesses specific clades of ALPs. Branches that are supported by bootstrap values >70% are noted. InterPro-based analysis reveals that many of these proteins contain common adhesin domains [i.e., invasin/intimin domains (IPR008964) and pectate lyase folds (IPR011050)]. They also have domains associated with additional functionality (basis for branch highlighting): (i) sugar binding [e.g., galactose-binding-like (IPR008979) and Concanavalin A-like lectin (IPR013320)]; (ii) glycosaminoglycan (GAG)-binding (IPR012333); or (iii) peptidase activity [e.g., carboxypeptidase regulatory region (IPR008969) and beta-lactamase/transpeptidase-like fold (IPR012338)]; (iv) transglycosidase activity [e.g., glycosidase superfamily domains (SSF51445)]; and/or (v) general adhesin/porin activity [e.g., Bacillus anthracis OMP repeats/DUF11 (IPR001434)]. See Table 12 for a complete list of ALPs and domains identified by InterProScan. (B) qRT-PCR analyses of the expression of selected M. smithii ALP genes in the ceca of gnotobiotic mice colonized with M. smithii (Msm) alone or with Msm and B. thetaiotaomicron (Bt) [n=5-6/group; each sample assayed in triplicate; mean values±SEM are plotted]. *, P<0.05; ***, P<0.005.

[0035] FIG. 8. depicts an illustration showing the importance of the molybdopterin biosynthesis pathway for methanogenesis from carbon dioxide in M. smithii. (A) In silico metabolic reconstruction of the predicted molybdopterin biosynthesis pathway encoded by the M. smithii genome. Molybdopterin can chelate molybdate (MoO₄⁻) or tungstate (WO₄²⁻) ions. Abbreviations: MoaABCE, molybdenum cofactor biosynthesis proteins A (MSM0849, MSM1406), B (MSM0840), C (MSM1362), and E (MSM0130); MoeAB, molybdopterin biosynthesis proteins A (MSM1343) and B (MSM0729); ModABC, molybdate ABC transport system (MSM1609-11); MobAB, molybdopterin-guanine dinucleotide (MGD) biosynthesis proteins A (MSMO240) and B (MSM1407); PP, pyrophosphate. Note that the molybdate transporter may also be used for WO₄²⁻, as no dedicated complex has been identified for its transport. (B) Schematic of the first step in the methanogenesis pathway from carbon dioxide (CO₂) catalyzed by tungsten-containing formylmethanofuran dehydrogenase (Fwd; MSM1408-14, MSM0783, MSM1396). Essential cofactors for this reaction include tungsten delivered by MGD, methanofuran (MFN), and ferridoxin [Fd; converted from a reduced (red) to oxidized (ox) form during the reaction].

[0036] FIG. 9. illustrates the divergence in genes involved in surface variation, genome evolution, and metabolism among M. smithii strains and in the human gut microbiomes of two healthy adults. Each of the 139,521 unidirectional reads in the metagenomic dataset (Gill et al., (2006) Science 312, 1355-9) were compared to the M. smithii PS genome using NUCmer. Reads with nucleotide sequence identity ≧80% (present) are plotted. A summary of representation of M. smithii PS genes present in the metagenomic dataset is displayed at the bottom of the graph (92% of the total ORFs). [Note that the gaps are indications of genome plasticity in the dataset, and include transposases, restriction-modification systems and prophage genes.] Selected regions of heterogeneity (divergence) are highlighted; genes in these regions are involved in the metabolism of bacterial products, recombination/repair machinery (Recomb), anti-microbial resistance (AntiMicrob), surface variation (Surface), and adhesion (ALPs). See Table 2 for details.

[0037] FIG. 10 depicts three graphs showing the dose effect of atorvastatin (A), pravastatin (B), and rosuvastatin (C) on M. smithii strain PS.

[0038] FIG. 11 depicts three graphs showing the dose effect of atorvastatin (A), pravastatin (B), and rosuvastatin (C) on M. smithii strain F1.

[0039] FIG. 12 depicts three graphs showing the dose effect of atorvastatin (A), pravastatin (B), and rosuvastatin (C) on M. smithii strain ALI.

[0040] FIG. 13 depicts three graphs showing the dose effect of atorvastatin (A), pravastatin (B), and rosuvastatin (C) on M. smithii strain B181.

[0041] FIG. 14 depicts three graphs showing the effect of statins (concentration of 1 mM) on B. thetaiotaomicron.

[0042] FIG. 15 depicts two photographs of the PHAT system described in the Examples. Panel A shows the pressurized incubation vessels within the anaerobic chamber, while Panel B shows an individual PHAT system outside of the chamber.

[0043] FIG. 16 depicts three graphs showing the correlation of methanogen levels in the fecal microbiota of MZ and DZ co-twins. The presence and levels of fecal methanogens were defined by qPCR assay that targeted the mcrA gene in samples obtained from MZ twin pairs (A) (n=40) and DZ twin pairs (B) (n=28). Dashed lines represent 95% confidence intervals for linear regression. (C) Correlation between mcrA levels in fecal samples collected at two time points per individual (2-mo interval between sampling). All axes in A-C are log₁₀ (genome equivalents per ng total DNA+1).

[0044] FIG. 17 depicts a schematic showing ammonia assimilation for M. smithii and charts showing normalized RNA-Seq reads assigned to the gene encoding an ammonium transporter (AmtB) and ECs involved in ammonia assimilation. (A) Overview of the two pathways in M. smithii for assimilating ammonia: The energy-dependent glutamine synthetase-glutamate synthase pathway has high affinity for ammonia (red arrow); an ATP-independent pathway has lower affinity (orange). (B) Strain-specific differences in the relative expression of components of the high affinity Gln pathway and the energy-independent low affinity pathway for ammonia assimilation. Mean values±SEM are plotted. Colors represent components of the two pathways shown in A; color codes are coordinated between A and B. (C) Strain-specific differences in levels of expression of amtB. P<0.0001 by one-way ANOVA.

[0045] FIG. 18 depicts graphs showing differential expression of M. smithii adhesin-like proteins (ALPs). Members of selected ALP OGUs with strain-specific differences in their expression profiles (A) and strain-specific, as well as OGU-associated, differences in their sensitivity to levels of formate during midlog phase growth (B). OGUs 112, 412, 827, and 208 exhibit strain-specific differences in their expression irrespective of formate concentration (one-way ANOVA, P<0.0001), whereas OGUs 226, 287, 18, 133, and 37 contain at least one representative that is significantly regulated by formate concentration. Mean values±SEM are plotted (n=6 replicates per condition). * indicates a ≧2-fold difference, PPDE≧0.97.

[0046] FIG. 19 depicts schematics showing the phylogentic lineage of bacterial taxa that co-occur with human gut methanogens (M. smithii) and their phylogenetic lineages. Shown in A-C are sections of the Arb parsimony insertion trees for selected co-occurring lineages. Trees contain all OTUs found in >9 samples and their relatives with cultured representatives or with known biological properties for [Firmicutes; Clostridiales; Cluster I; Gut Clone Group] (A); [Proteobacteria; Delta Proteobacteria; Desulfovibrio] (B); and [Firmicutes; Clostridiales; Cluster IV; Sporobacter/Oscillospira] (C). The Desulfovibrio tree (B) has two OTUs, OTU7973 and OTU12216, that were found in fewer than 10 fecal samples. OTU7973 was only present in samples that were mcrA positive (abbreviated “M.+”). In contrast, all samples that contained OTU12216 were mcrA negative (“M.−”). The branches of the tree are colored by the co-occurrence index (CI), which is calculated as the log-fold difference in the average relative abundance in M. smithii-positive versus -negative samples. Red indicates a positive association with M. smithii; blue, negative; purple, neutral. The CI scores are listed after the OTU name (the number following the colon). OTUs with a significantly higher relative abundance in M. smithii-positive versus -negative individuals (ANOVA, P<0.05 with FDR correction) are marked with a star. Internal branches are colored based on the average value for all of the OTUs descending from that node. The branches were colored across a red-blue spectrum by using −1.8 and +1.8 as min/max values. These values were selected to represent the range of CI scores (which were between −1.71 and 1.8). OTUs always or never detected in M. smithii-positive individuals were assigned the maximum and minimum CI score, respectively; a CI could not be calculated for these OTUs because it would require dividing by zero.

[0047] FIG. 20 depicts a graph and images showing the comparison of strains based on their SNP content. Draft M. smithii genomes were aligned by using Mauve, and SNPs were identified within localized collinear blocks (LCBs). (A) Pair-wise comparison of shared SNPs among all 20 strains plus the reference type strain (MsmPS). (B) Comparison of percent shared SNPs among M. smithii strains by familial relationship. The statistical analysis consisted of a one-way ANOVA followed by Tukey's post hoc analysis. (C) Principal components analysis of SNP data reveals clustering by individual and by family.

[0048] FIG. 21 depicts graphs and images showing a comparison of M. smithii strains based on their gene content. (A) Overview of M. smithii pan-genome as defined by operational gene units (OGUs) with >90% identity by CD-Hit. (B) Pairwise comparisons of strains for the presence of shared OGUs. Boxes are shaded from light gray to black to display the percent of total OGUs that are shared in a given comparison. The colored inset summarizes M. smithii strain nomenclature and relates the nomenclature to the human donor based on family and the zygosity of co-twins. (C) Principal components analysis of the OGU table shown in B. (D) Comparison of percent shared OGUs of M. smithii strains by familial relationship. Mean values±SEM are plotted. The statistical significance of observed differences between groups was determined one-way ANOVA followed by Tukey's post hoc analysis, with red bars indicating P<0.001 and green bars indicating P<0.01.

[0049] FIG. 22 depicts a graph and table showing a rarefaction analysis of gene discovery in the M. smithii pan-genome. (A) Rarefaction curve. Light blue and light orange lines indicate 95% confidence limits. (B) OGUs present in strains as shown by the cumulative number of strains containing the OGU. Just over 1,000 OGUs are present in all 10 strains of a family. The MZ family (blue) has a higher number of OGUs present in a greater number of strains (5-10), whereas the DZ family (orange) has more OGUs present in 2-4 strains.

[0050] FIG. 23 depicts graphs and table, which discriminate M. smithii strains based on their content of genes encoding COGs and enzymes with assigned enzyme classification (EC) numbers. (A) COG assignments in core versus variable OGUs distributed over the various strains. COG assignments were given to all possible OGUs, both for core genes (i.e., OGUs containing genes from all strains) and variably represented genes (OGUs containing genes from one or more of the strains). The left column shows the distribution of COG categories in the defined “core” component of the M. smithii pan-genome. COG categories represented in each strain are displayed as the percent of all OGUs in that strain that had an assigned COG annotation. Each COG was assigned a color, which is defined in the key in (B). (C, D) Distribution of strains based on their enzyme classification (EC) assignments. ECs were assigned to protein coding genes in each strain by using KEGG. Canonical correspondence analysis was used to determine which ECs contributed to the variation seen between the strains. ECs located furthest from the origin contribute most to the variance of strains. (E) Results of a binomial test for enrichment or depletion of ECs in various strains after normalizing to the number of genes in that strain that could be assigned a KEGG annotation. Strain prefixes are listed across the table. The total number of genes assigned to a KEGG annotation for each strain is listed below each strain prefix. A description of the EC numbers listed in (E) is provided in the table in (F).

[0051] FIG. 24 (A) depicts graphically the growth characteristics of M. smithii strains when cultured in modified MBC medium containing either low or high concentrations of formate. All strains were grown under an atmosphere of 80% H₂/20% CO₂ at 30 psi. Gases were replenished every 6 h. Aliquots were taken at the time of repressurization for measurement of optical density (OD) at 600 nm to monitor growth. (B) depicts graphically the normalized RNA-Seq reads assigned to KEGG gene families involved in the methanogenesis pathway. For each EC, expression is displayed as mean percent normalized counts (normalized per million reads and to the length of the gene). (C) shows a diagram of the methanogenesis pathway, The colors assigned to each EC are coordinated with the diagram, in order to indicate the step at which each EC acts.

[0052] FIG. 25 depicts two graphs showing gene and dinucleotide atypicality in strain METSMIALI. (A) Threshold for gene atypicality in strain METSMIALI against the whole-genome model. The vertical axis represents the compositional typicality of each gene in the genome of the METSMIALI type strain. Scores along the vertical axis represent the G-statistic [made negative so as to represent gene typicality following the convention of Tsirigos et al. (57)]. A threshold for the significance of atypical genes has been chosen in two ways: either using a rank order threshold (ref. 57; red points) or by naively assuming a normal distribution and applying the Bonferroni corrected G-test (red plus blue points). In this case, the two methods select similar significance thresholds. (B) Dinucleotide atypicality in the METSMIALI genome. The colored trendlines indicate differences between gene dinucleotide composition and the composition of either the whole-genome (black line) or ribosomal proteins (blue lines). Each trendline represents a moving average over a 50-gene window. The gray lines show gene typicality for each gene against the whole genome model. In order for a gene to be scored as transferred, the individual gene typicality must be below the significance threshold (horizontal lines) for both comparison sets. Tracks along the top of the graph represent gene annotations; from top to bottom, core genome members (thin blue line), ribosomal proteins (blue squares), horizontally transferred genes (green circles), ALP genes (red triangles), degenerate prophage (pink bar), and members of the variable genome (thin black line).

[0053] FIG. 26 depicts graphically the correlation between M. smithii transcriptional profiles generated from RNA-Seq versus GeneChip analyses. RNA samples were processed and analyzed by both RNA-Seq and by GeneChip. The two platforms yielded highly similar results (Pearson's correlation r² values: 0.86-0.89, P<2e⁻¹⁶).

[0054] FIG. 27 depicts an analysis of proghages present in M. smithii strains schematically. Raw 454 titanium sequencing reads from those strains with predicted prophages (Table 23) were mapped onto the M. smithii type strain prophage sequence (coordinates 1705364:1736208) by using Nucmer and plotted with Mummer (53). Axes are from 80 to 100% similarity. The map is divided into two panels (A) and (B) at approximately the midpoint.

### DETAILED DESCRIPTION

[0055] The present invention provides arrays and methods utilizing the genome and proteome of the methanogen M. smithii, which is the predominant methanogen present in the human gastrointestinal tract. Modulating the Archea population of the gastrointestinal tract of a subject, of which M. smithii is a major component, modulates the efficiency and selectivity of carbohydrate metabolism. The genome and proteome of M. smithii may be used, according to the methods presented herein, to promote weight loss or weight gain in a subject. In particular, the methods of the present invention may be used to identify compounds that promote weight loss or weight gain in a subject. The method relies on applicants' discovery that certain M. smithii gene products are conserved between M. smithii strains, yet divergent (or absent) from the correlating gene products expressed by the subject's microbiome or genome. This allows the selection of compounds that specifically modulate the M. smithii gene product, while substantially not modulating the subject's gene product.

### I. Arrays

[0056] One aspect of the invention encompasses use of biomolecules in an array. As used herein, biomolecule refers to either nucleic acids derived from a M. smithii genome, or polypeptides derived from a M. smithii proteome. A M. smithii genome or proteome may be utilized to construct arrays that may be used for several applications, including discovery of compounds that modulate one or more M. smithii gene products, judging efficacy of existing weight gain or loss regimes, and for the identification of biomarkers involved in weight gain or loss, or a weight gain or loss related disorder.

[0057] The array may be comprised of a substrate having disposed thereon at least one biomolecule. Several substrates suitable for the construction of arrays are known in the art. The substrate may be a material that may be modified to contain discrete individual sites appropriate for the attachment or association of the biomolecule and is amenable to at least one detection method. Alternatively, the substrate may be a material that may be modified for the bulk attachment or association of the biomolecule and is amenable to at least one detection method. Non-limiting examples of substrate materials include glass, modified or functionalized glass, plastics (including acrylics, polystyrene and copolymers of styrene and other materials, polypropylene, polyethylene, polybutylene, polyurethanes, TeflonJ, etc.), nylon or nitrocellulose, polysaccharides, nylon, resins, silica or silica-based materials including silicon and modified silicon, carbon, metals, inorganic glasses and plastics. In an exemplary embodiment, the substrates may allow optical detection without appreciably fluorescing.

[0058] A substrate may be planar, a substrate may be a well, i.e. a 1534-, 384-, or 96-well plate, or alternatively, a substrate may be a bead. Additionally, the substrate may be the inner surface of a tube for flow-through sample analysis to minimize sample volume. Similarly, the substrate may be flexible, such as a flexible foam, including closed cell foams made of particular plastics. Other suitable substrates are known in the art.

[0059] The biomolecule or biomolecules may be attached to the substrate in a wide variety of ways, as will be appreciated by those in the art. The biomolecule may either be synthesized first, with subsequent attachment to the substrate, or may be directly synthesized on the substrate. The substrate and the biomolecule may both be derivatized with chemical functional groups for subsequent attachment of the two. For example, the substrate may be derivatized with a chemical functional group including, but not limited to, amino groups, carboxyl groups, oxo groups or thiol groups. Using these functional groups, the biomolecule may be attached using functional groups on the biomolecule either directly or indirectly using linkers.

[0060] The biomolecule may also be attached to the substrate non-covalently. For example, a biotinylated biomolecule can be prepared, which may bind to surfaces covalently coated with streptavidin, resulting in attachment. Alternatively, a biomolecule or biomolecules may be synthesized on the surface using techniques such as photopolymerization and photolithography. Additional methods of attaching biomolecules to arrays and methods of synthesizing biomolecules on substrates are well known in the art, i.e. VLSIPS technology from Affymetrix (e.g., see U.S. Pat. No. 6,566,495, and Rockett and Dix, Xenobiotica 30(2):155-177, each of which is hereby incorporated by reference in its entirety).

[0061] In one embodiment, the biomolecule or biomolecules attached to the substrate are located at a spatially defined address of the array. Arrays may comprise from about 1 to about several hundred thousand addresses. In one embodiment, the array may be comprised of less than 10,000 addresses. In another alternative embodiment, the array may be comprised of at least 10,000 addresses. In yet another alternative embodiment, the array may be comprised of less than 5,000 addresses. In still another alternative embodiment, the array may be comprised of at least 5,000 addresses. In a further embodiment, the array may be comprised of less than 500 addresses. In yet a further embodiment, the array may be comprised of at least 500 addresses.

[0062] A biomolecule may be represented more than once on a given array. In other words, more than one address of an array may be comprised of the same biomolecule. In some embodiments, two, three, or more than three addresses of the array may be comprised of the same biomolecule. In certain embodiments, the array may comprise control biomolecules and/or control addresses. The controls may be internal controls, positive controls, negative controls, or background controls.

[0063] The biomolecule may be a nucleic acid derived from any M. smithii genome. In some embodiments, a biomolecule may be a nucleic acid derived from the M. smithii genome with the GenBank Accession number CP000678, comprising, in part, nucleic acid sequences labeled MSM001 through MSM1795, inclusive. In other embodiments, a biomolecule may be a nucleic acid derived from a M. smithii genome selected from the group consisting of a M. smithii genome with the GenBank Accession number CP000678, AEKU00000000, AELL00000000, AELM00000000, AELN00000000, AELO00000000, AELP00000000, AELQ00000000, AELR00000000, AELS00000000, AELT00000000, AELU00000000, AELV00000000, AELW00000000, AELX00000000, AELY00000000, AELZ00000000, AEMA00000000, AEMB00000000, AEMC00000000, and AEMD00000000. Such nucleic acids may include RNA (including mRNA, tRNA, and rRNA), DNA, and naturally occurring or synthetically created derivatives. A nucleic acid derived from a M. smithii genome is a nucleic acid that comprises at least a portion of a nucleic acid sequence selected from the nucleic acid sequences listed in Table A, Table B, and/or Table D. The nucleic acid may comprise fewer than 10, at least 10, at least 20, at least 30, at least 40, at least 50, at least 60, at least 70, at least 80, at least 90, at least 100, at least 150, at least 200, or more than 200 bases of a nucleic acid sequence selected from the nucleic acid sequences listed in Table A, Table B, and/or Table D. One embodiment of the invention is an array comprising a substrate, the substrate having disposed thereon at least one nucleic acid, wherein the nucleic acid comprises a nucleic acid sequence selected from the nucleic acid sequences listed in Table A. In another embodiment, the nucleic acid consists of a nucleic acid sequence selected from the nucleic acid sequences listed in Table A. In another embodiment, the nucleic acid comprises a nucleic acid sequence selected from the nucleic acid sequences listed in Table D. In other exemplary embodiments, the nucleic acid consists of a nucleic acid sequence selected from the nucleic acid sequences listed in Table D. In some exemplary embodiments, the nucleic acid comprises a nucleic acid sequence selected from the nucleic acid sequences listed in Table B. In other exemplary embodiments, the nucleic acid consists of a nucleic acid sequence selected from the nucleic acid sequences listed in Table B. In still other exemplary embodiments, the nucleic acid comprises a nucleic acid sequence selected from the nucleic acid sequences listed in Table B, and further comprises a nucleic acid sequence selected from the nucleic acid sequences listed in Table D.

[0064] In one embodiment, the nucleic acid or nucleic acids may be selected from the group of nucleic acids listed in Table A, B and D that are conserved among M. smithii strains, but divergent from a corresponding nucleic acid of the subject. In this context, a “corresponding nucleic acid” refers to a nucleic acid sequence of the subject, or the subject's micobiome, that has greater than 75% identity to a nucleic acid sequence of Table A, B or D. The term, “divergent,” as used herein, refers to a sequence of Table A, B or D that has less than 99% identity, but greater than 75% identity, with a nucleic acid sequence of the subject, or the subject's microbiome. For instance, in some embodiments, divergent refers to less than or equal to about 98%, 97%, 96%, 95%, 94%, 93%, 92%, 91%, 90%, 89%, 88%, 87%, 86%, 85%, 84%, 83%, 82%, 81%, 80%, 79%, 78%, 77%, or 76%, identity between the nucleic acid sequence of Table A, B or D and the nucleic acid sequence of the subject. Conversely, the term “conserved,” as used herein, refers to a nucleic acid sequence of one M. smithii strain that has greater than about 90% identity to a nucleic acid sequence from another M. smithii strain.

[0065] If a subject, or the subject's microbiome, does not comprise a nucleic acid sequence that has greater than 75% identity to a nucleic acid sequence of Table A, B, or D, that nucleic acid sequence of Table A, B, or D is “absent” from the subject. In certain embodiments, the nucleic acid or nucleic acids of the array of the invention are selected from the group comprising nucleic acid sequences that are absent from the subject gut microbiome or genome. For instance, in one embodiment, the nucleic acid may be selected from the group of nucleic acids designated absent or divergent in Table 2. Percent identity may be determined as discussed below.

[0066] Alternatively, the nucleic acid or nucleic acids may be selected from the group of nucleic acids listed in Table A, B and D that are not conserved among M. smithii strains, For example, while the genome of a M. smithii strain may comprise at least one nucleic acid that enodes an adhesin-like protein (ALP), the nucleic acid encoding a particular ALP may not be present in all strains. Stated another way, a nucleic acid encoding a particular type of protein (e.g. an ALP) may show strain-specific differences in representation among M. smithii strains.

[0067] Alternatively, the nucleic acid or nucleic acids derived from a M. smithii genome may be selected from the group of nucleic acids comprising nucleic acid sequences that are expressed in vivo by M. smithii while residing in the gastrointestinal tract of a subject. In another embodiment, the nucleic acid or nucleic acids may be selected from the group of nucleic acids comprising nucleic acid sequences that are expressed by M. smithii while residing in the gastrointestinal tract of a subject, and whose expression levels are not affected by the presence of actively fermenting bacteria. In another embodiment, the nucleic acid or nucleic acids may be selected from the group of nucleic acids comprising nucleic acid sequences that are expressed by M. smithii while residing in the gastrointestinal tract of a subject, and whose expression levels are affected by the presence of actively fermenting bacteria. The in vivo expression levels of a nucleic acid may be determined by methods known in the art, including RT-PCR. In yet another embodiment, the nucleic acid or nucleic acids may be selected from the group of nucleic acids that encode the M. smithii transcriptome or metabolome. In yet another embodiment, the nucleic acid or nucleic acids may be selected from the group of nucleic acids whose expression level differ between strains of M. smithii when the bacteria are grown in vitro or in vivo under similar conditions.

[0068] The biomolecule may also be a polypeptide derived from a M. smithii proteome. A polypeptide derived from the M. smithii proteome is a polypeptide that is encoded by at least a portion of a nucleic acid sequence selected from the nucleic acid sequences listed in Table A, Table B or Table D. The polypeptide may comprise fewer than 10, at least 10, at least 20, at least 30, at least 40, at least 50, at least 60, at least 70, at least 80, at least 90, at least 100, at least 150, at least 200, or more than 200 amino acids encoded by a nucleic acid sequence selected from the nucleic acid sequences listed in Table A, Table B or Table D. One embodiment of the invention is an array comprising a substrate, the substrate having disposed thereon at least one polypeptide, wherein the polypeptide is encoded by a nucleic acid sequence selected from the nucleic acid sequences listed in Table A. Another embodiment of the invention is an array comprising a substrate, the substrate having disposed thereon at least one polypeptide, wherein the polypeptide is encoded by a nucleic acid sequence selected from the nucleic acid sequences listed in Table B. Still another embodiment of the invention is an array comprising a substrate, the substrate having disposed thereon at least one polypeptide, wherein the polypeptide comprises an amino acid sequence selected listed in Table C. A different embodiment of the invention is an array comprising a substrate, the substrate having disposed thereon at least one polypeptide, wherein the polypeptide is encoded by a nucleic acid sequence selected from the nucleic acid sequences listed in Table D.

[0069] In one embodiment, the polypeptide or polypeptides may be selected from the group of polypeptides comprising polypeptide sequences that are conserved amoung M. smithii strains, but divergent from a corresponding polypeptide of the subject. The terms conserved and divergent are used as defined above. In certain embodiments, the polypeptide or polypeptides are selected from the group comprising polypeptides absent from the subject gut microbiome or genome. In another embodiment, the polypeptide or polypeptides may be selected from the group of polypeptides comprising polypeptide sequences with greater than about 75% but less than about 99% identity to a correlating polypeptide from the subject gut microbiome or genome. In yet another embodiment, the polypeptide or polypeptides may be selected from the group of polypeptides comprising polypeptide sequence with greater than about 75%, 76%, 77%, 78%, 79%, 80%, 81%, 82%, 83%, 84%, 85%, 86%, 87%, 88%, 89%, 90%, 91%, 92%, 93%, 94%, 95%, 96%, 97%, or 98% identity to a correlating polypeptide from the subject gut microbiome or genome. In one embodiment, for instance, the polypeptide may be encoded by a nucleic acid designated absent or divergent in Table 2. Percent identity may be determined as discussed below.

[0070] Alternatively, the polypeptide or polypeptides derived from a M. smithii proteome may be encoded by a nucleic acid selected from the group of nucleic acids comprising nucleic acid sequences that are expressed in vivo by M. smithii while residing in the gastrointestinal tract of a subject. In another embodiment, the polypeptide or polypeptides may be encoded by a nucleic acid selected from the group of nucleic acids comprising nucleic acid sequences that are expressed by M. smithii while residing in the gastrointestinal tract of a subject, and whose expression levels are not affected by the presence of actively fermenting bacteria. In still another embodiment, the polypeptide or polypeptides may be encoded by a nucleic acid selected from the group of nucleic acids comprising nucleic acid sequences that are expressed by M. smithii while residing in the gastrointestinal tract of a subject, and whose expression levels are affected by the presence of actively fermenting bacteria. In yet another embodiment, the polypeptide or polypeptides may be encoded by a nucleic acid selected from the group of nucleic acids that encode the M. smithii transcriptome or metabolome.

[0071] The array may alternatively be comprised of biomolecules from the genome or proteome of M. smithii that are indicative of an obese subject microbiome. Alternatively, the array may be comprised of biomolecules from the genome or proteome of M. smithii that are indicative of a lean subject microbiome. A biomolecule is “indicative” of an obese or lean microbiome if it tends to appear more often in one type of microbiome compared to the other. Such differences may be quantified using commonly known statistical measures, such as binomial tests. An “indicative” biomolecule may be referred to as a “biomarker.”

[0072] Additionally, the array may be comprised of biomolecules from the genome or proteome of M. smithii that are modulated in the obese subject microbiome compared to the lean subject microbiome. As used herein, “modulated” may refer to a biomolecule whose representation or activity is different in an obese subject microbiome compared to a lean subject microbiome. For instance, modulated may refer to a biomolecule that is enriched, depleted, up-regulated, down-regulated, degraded, or stabilized in the obese subject microbiome compared to a lean subject microbiome. In one embodiment, the array may be comprised of a biomolecule enriched in the obese subject microbiome compared to the lean subject microbiome. In another embodiment, the array may be comprised of a biomolecule depleted in the obese subject microbiome compared to the lean subject microbiome. In yet another embodiment, the array may be comprised of a biomolecule up-regulated in the obese subject microbiome compared to the lean subject microbiome. In still another embodiment, the array may be comprised of a biomolecule down-regulated in the obese subject microbiome compared to the lean subject microbiome. In still yet another embodiment, the array may be comprised of a biomolecule degraded in the obese subject microbiome compared to the lean subject microbiome. In an alternative embodiment, the array may be comprised of a biomolecule stabilized in the obese subject microbiome compared to the lean subject microbiome.

[0073] Additionally, the biomolecule may be at least 80, 85, 90, or 95% homologous to a biomolecule derived from Tables A-D. In one embodiment, the biomolecule may be at least 80, 81, 82, 83, 84, 85, 86, 87, 88, or 89% homologous to a biomolecule derived from Table A. In another embodiment, the biomolecule may be at least 90, 91, 92, 93, 94, 95, 96, 97, 98, 99, or 100% homologous to a biomolecule derived from Table A. In another embodiment, the biomolecule may be at least 80, 81, 82, 83, 84, 85, 86, 87, 88, or 89% homologous to a biomolecule derived from Table B. In another embodiment, the biomolecule may be at least 90, 91, 92, 93, 94, 95, 96, 97, 98, 99, or 100% homologous to a biomolecule derived from Table B. In another embodiment, the biomolecule may be at least 80, 81, 82, 83, 84, 85, 86, 87, 88, or 89% homologous to a biomolecule derived from Table C. In another embodiment, the biomolecule may be at least 90, 91, 92, 93, 94, 95, 96, 97, 98, 99, or 100% homologous to a biomolecule derived from Table C. In another embodiment, the biomolecule may be at least 80, 81, 82, 83, 84, 85, 86, 87, 88, or 89% homologous to a biomolecule derived from Table D. In another embodiment, the biomolecule may be at least 90, 91, 92, 93, 94, 95, 96, 97, 98, 99, or 100% homologous to a biomolecule derived from Table D.

[0074] In determining whether a biomolecule is substantially homologous or shares a certain percentage of sequence identity with a sequence of the invention, sequence similarity may be determined by conventional algorithms, which typically allow introduction of a small number of gaps in order to achieve the best fit. In particular, “percent identity” of two polypeptides or two nucleic acid sequences is determined using the algorithm of Karlin and Altschul (Proc. Natl. Acad. Sci. USA 87:2264-2268, 1993). Such an algorithm is incorporated into the BLASTN and BLASTX programs of Altschul et al. (J. Mol. Biol. 215:403-410, 1990). BLAST nucleotide searches may be performed with the BLASTN program to obtain nucleotide sequences homologous to a nucleic acid molecule of the invention. Equally, BLAST protein searches may be performed with the BLASTX program to obtain amino acid sequences that are homologous to a polypeptide of the invention. To obtain gapped alignments for comparison purposes, Gapped BLAST is utilized as described in Altschul et al. (Nucleic Acids Res. 25:3389-3402, 1997). When utilizing BLAST and Gapped BLAST programs, the default parameters of the respective programs (e.g., BLASTX and BLASTN) are employed. See http://www.ncbi.nlm.nih.gov for more details.

[0075] Furthermore, the biomolecules used for the array may be labeled. One skilled in the art understands that the type of label selected depends in part on how the array is being used. Suitable labels may include fluorescent labels, chromagraphic labels, chemi-luminescent labels, FRET labels, etc. Such labels are well known in the art.

### II. Use of the Arrays

[0076] The arrays may be utilized in several suitable applications. For example, the arrays may be used in methods for detecting association between a biomolecule of the array and a compound in a sample. In this context, compound refers to a nucleic acid, a protein, a lipid, or chemical compound. This method typically comprises incubating a sample with the array under conditions such that the compounds comprising the sample may associate with the biomolecules attached to the array. The association is then detected, using means commonly known in the art, such as fluorescence. “Association,” as used in this context, may refer to hybridization, covalent binding, ionic binding, hydrogen binding, van der Waals binding, and dated binding. A skilled artisan will appreciate that conditions under which association may occur will vary depending on the biomolecules, the compounds, the substrate, and the detection method utilized. As such, suitable conditions may have to be optimized for each individual array created.

[0077] In one embodiment, the array may be used as a tool in methods to determine whether a compound has efficacy for modulating a gene product of M. smithii. In certain embodiments, the array may be used as a tool in methods to determine whether a compound has efficacy for modulating a gene product of M. smithii while M. smithii is residing in the gastrointestinal tract of a subject. Typically, such a method comprises comparing a plurality of biomolecules from either the M. smithii genome or proteome before and after administration of a compound for modulating a gene product of M. smithii, such that if the abundance of a biomolecule that correlates with the gene product is modulated, the compound is efficacious in modulating a gene product of M. smithii. The array may also be used to quantitate the plurality of biomolecule's of M. smithii's genome or proteome before and after administration of a compound. The abundance of each biomolecule in the plurality may then be compared to determine if there is a decrease in the abundance of biomolecules associated with the compound. In other embodiments, the array may be used to quantify the levels of M. smithii in an obese subject prior to, during, or after treatment for obesity. Alternatively, the array may be used to quantify the levels of M. smithii in an underfed individual prior to, during, or after implementation of dietary recommendations designed to increase nutrient and energy harvest.

[0078] In a further embodiment, the array may be used as a tool in methods to determine the identity of an M. smithii strain present in a subject's microbiome. Typically, such a method comprises collecting a sample from a subject and using an array of the invention to determine the presence, absence or abundance of an ALP gene product in the sample, and determining whether a particular strain is present in the sample based on the presence, absence or abundance of an ALP gene product.

[0079] In still a further embodiment, the array may be used as a tool in methods to determine whether a compound has efficacy for treatment of weight gain or a weight gain related disorder in a subject. Typically, such a method comprises comparing a plurality of biomolecules of M. smithii's genome or proteome before and after administration of a compound for the treatment of weight gain or a weight gain related disorder, such that if the abundance of biomolecules associated with weight gain decreased after treatment, the compound is efficacious in treating weight gain in a subject.

[0080] In still a further embodiment, the array may be used as a tool in methods to determine whether a compound has efficacy for treatment of weight loss or a weight loss related disorder in a subject. Typically, such a method comprises comparing a plurality of biomolecules of M. smithii's genome or proteome before and after administration of a compound for the treatment of weight loss or a weight loss related disorder, such that if the abundance of biomolecules associated with weight loss decreased after treatment, the compound is efficacious in treating weight loss in a subject.

[0081] The present invention also encompasses M. smithii gene profiles. Generally speaking, a gene profile is comprised of a plurality of values with each value representing the abundance of a biomolecule derived from either the M. smithii genome or proteome. The abundance of a biomolecule may be determined, for instance, by sequencing the nucleic acids of the M. smithii genome as detailed in the examples. This sequencing data may then be analyzed by known software to determine the abundance of a biomolecule in the analyzed sample. An M. smithii gene profile may comprise biomolecules from more than one M. smithii strain. The abundance of a biomolecule may also be determined using an array described above. For instance, by detecting the association between compounds comprising an M. smithii derived sample and the biomolecules comprising the array, the abundance of M. smithii biomolecules in the sample may be determined.

[0082] A profile may be digitally-encoded on a computer-readable medium. The term “computer-readable medium” as used herein refers to any medium that participates in providing instructions to a processor for execution. Such a medium may take many forms, including but not limited to non-volatile media, volatile media, and transmission media. Non-volatile media may include, for example, optical or magnetic disks. Volatile media may include dynamic memory. Transmission media may include coaxial cables, copper wire and fiber optics. Transmission media may also take the form of acoustic, optical, or electromagnetic waves, such as those generated during radio frequency (RF) and infrared (IR) data communications. Common forms of computer-readable media include, for example, a floppy disk, a flexible disk, hard disk, magnetic tape, or other magnetic medium, a CD-ROM, CDRW, DVD, or other optical medium, punch cards, paper tape, optical mark sheets, or other physical medium with patterns of holes or other optically recognizable indicia, a RAM, a PROM, and EPROM, a FLASH-EPROM, or other memory chip or cartridge, a carrier wave, or other medium from which a computer can read.

[0083] A particular profile may be coupled with additional data about that profile on a computer readable medium. For instance, a profile may be coupled with data about what therapeutics, compounds, or drugs may be efficacious for that profile. Conversely, a profile may be coupled with data about what therapeutics, compounds, or drugs may not be efficacious for that profile. Alternatively, a profile may be coupled with known risks associated with that profile. Non-limiting examples of the type of risks that might be coupled with a profile include disease or disorder risks associated with a profile. The computer readable medium may also comprise a database of at least two distinct profiles.

[0084] Profiles may be stored on a computer-readable medium such that software known in the art and detailed in the examples may be used to compare more than one profile.

[0085] Another aspect of the invention is a method for selecting a compound that has efficacy for modulating a gene product of M. smithii present in the gastrointestinal tract of a subject. The method generally comprises comparing an M. smithii gene profile to a gene profile of the subject and identifying a gene product of the M. smithii gene profile that is divergent from a corresponding gene product of the subject gene profile, or absent in the gene profile of the subject. Next the method comprises selecting a compound that modulates the M. smithii gene product, but does not substantially modulate the corresponding gene product of the subject. In a further embodiment, the compound also does not substantially modulate the corresponding gene product of an archaeon other than M. smithii, or a non-archaeal microbe, in the gastrointestinal tract of the subject. The compound may for instance, inhibit or promote the growth of M. smithii. The compound may also decrease or increase the efficiency of carbohydrate metabolism in the subject. Accordingly, the compound may also promote weight loss or weight gain in the subject.

[0086] Another further aspect of the invention is a method for selecting a compound that has efficacy for modulating a gene product of M. smithii present in the gastrointestinal tract of a subject. The method comprises comparing an M. smithii gene profile to a gene profile of the subject and identifying a gene product of the M. smithii gene profile that is divergent from a corresponding gene product of the subject gene profile, or absent in the gene profile of the subject. Next the method comprises selecting a compound that can be administered so as to modulate the M. smithii gene product, but not substantially modulate the corresponding gene product of the subject. In a further embodiment, the administered compound also does not substantially modulate the corresponding gene product of an archaeon other than M. smithii, or a non-archaeal microbe, in the gastrointestinal tract of the subject. The compound may be administered, for instance, so as to inhibit or promote the growth of M. smithii. The compound may also be administered so as to decrease or increase the efficiency of carbohydrate metabolism in the subject. Accordingly, the compound may also be administered so as to promote weight loss or weight gain in the subject.

[0087] The present invention also encompasses a kit for evaluating a compound, therapeutic, or drug. Typically, the kit comprises an array and a computer-readable medium. The array may comprise a substrate having disposed thereon at least one biomolecule that is derived from the M. smithii genome or proteome. In some embodiments, the array may comprise at least one biomolecule that is derived from the M. smithii metabolome or transcriptome. The computer-readable medium may have a plurality of digitally-encoded profiles wherein each profile of the plurality has a plurality of values, each value representing the abundance of a biomolecule derived from M. smithii detected by the array. The array may be used to determine a profile for a particular subject under particular conditions, and then the computer-readable medium may be used to determine if the profile is similar to known profile stored on the computer-readable medium. Non-limiting examples of possible known profiles include obese and lean profiles for several different subjects.

### III. Method of Promoting Weight Loss or Gain

[0088] A further aspect of the invention encompasses a method of promoting weight loss or gain. The method incorporates the discovery that modulating the Archaeon population of the gastrointestinal tract of a subject, of which M. smithii is a major component, modulates the efficiency and selectivity of carbohydrate metabolism. Furthermore, the method relies on applicants' discovery that certain M. smithii gene products are conserved amoung M. smithii strains, yet divergent (or absent) from the correlating gene products expressed by the subject's microbiome or genome. This divergence allows the selection of compounds to specifically modulate the M. smithii gene product, while substantially not modulating the subject's gene product, as described above.

[0089] By way of non-limiting example, weight loss may be promoted by administering an HMG-CoA reductase inhibitor to a subject. In an exemplary embodiment, the inhibitor will selectively inhibit the HMG-CoA reductase expressed by M. smithii and not the HMG-CoA reductase expressed by the subject. In another embodiment, a second HMG CoA-reductase inhibitor may be administered that selectively inhibits the HMG CoA-reductase expressed by the subject in lieu of the HMG-CoA reductase expressed by M. smithii. In yet another embodiment, an HMG-CoA reductase inhibitor that selectively inhibits the HMG-CoA reductase expressed by the subject may be administered in combination with an HMG-CoA reductase inhibitor that selectively inhibits the HMG-CoA reducase expressed by M. smithii. One means that may be utilized to achieve such selectivity is via the use of time-release formulations as discussed below. Compounds that inhibit HMG-CoA reductase are well known in the art. For instance, non-limiting examples include atorvastatin, pravastatin, rosuvastatin, and other statins.

### (a) Pharmaceutical Compositions

[0090] These compounds, for example HMG-CoA reductase inhibitors, may be formulated into pharmaceutical compositions and administered to subjects to promote weight loss. According to the present invention, a pharmaceutical composition includes, but is not limited to, pharmaceutically acceptable salts, esters, salts of such esters, or any other adduct or derivative which upon administration to a subject in need is capable of providing, directly or indirectly, a composition as otherwise described herein, or a metabolite or residue thereof, e.g., a prodrug.

[0091] The pharmaceutical compositions maybe administered by several different means that will deliver a therapeutically effective dose. Such compositions can be administered orally, parenterally, by inhalation spray, rectally, intradermally, intracisternally, intraperitoneally, transdermally, bucally, as an oral or nasal spray, or topically (i.e. powders, ointments or drops) in dosage unit formulations containing conventional nontoxic pharmaceutically acceptable carriers, adjuvants, and vehicles as desired. Topical administration may also involve the use of transdermal administration such as transdermal patches or iontophoresis devices. The term parenteral as used herein includes subcutaneous, intravenous, intramuscular, or intrasternal injection, or infusion techniques. In an exemplary embodiment, the pharmaceutical composition will be administered in an oral dosage form. Formulation of drugs is discussed in, for example, Hoover, John E., Remington's Pharmaceutical Sciences, Mack Publishing Co., Easton, Pa. (1975), and Liberman, H. A. and Lachman, L., Eds., Pharmaceutical Dosage Forms, Marcel Decker, New York, N.Y. (1980).

[0092] The amount of an HMG-CoA reductase inhibitor that constitutes an “effective amount” can and will vary. The amount will depend upon a variety of factors, including whether the administration is in single or multiple doses, and individual subject parameters including age, physical condition, size, and weight. Those skilled in the art will appreciate that dosages may also be determined with guidance from Goodman & Goldman's The Pharmacological Basis of Therapeutics, Ninth Edition (1996), Appendix II, pp. 1707-1711 and from Goodman & Goldman's The Pharmacological Basis of Therapeutics, Tenth Edition (2001), Appendix II, pp. 475-493.

### (b) Controlled Release Formulations

[0093] As described above, an HMG-CoA reductase inhibitor may be specific for the M. smithii enzyme, or for the subject's enzyme, depending, in part, on the selectivity of the particular inhibitor and the area the inhibitor is targeted for release in the subject. For example, an inhibitor may be targeted for release in the upper portion of the gastrointestinal tract of a subject to substantially inhibit the subject's enzyme. In contrast, the inhibitor may be targeted for release in the lower portion of the gastrointestinal tract of a subject, i.e., where M. smithii resides, then the inhibitor may substantially inhibit M. smithii's enzyme.

[0094] In order to selectively control the release of an inhibitor to a particular region of the gastrointestinal tract for release, the pharmaceutical compositions of the invention may be manufactured into one or several dosage forms for the controlled, sustained or timed release of one or more of the ingredients. In this context, typically one or more of the ingredients forming the pharmaceutical composition is microencapsulated or dry coated prior to being formulated into one of the above forms. By varying the amount and type of coating and its thickness, the timing and location of release of a given ingredient or several ingredients (in either the same dosage form, such as a multi-layered capsule, or different dosage forms) may be varied.

[0095] The coating can and will vary depending upon a variety of factors, including, the particular ingredient, and the purpose to be achieved by its encapsulation (e.g., time release). The coating material may be a biopolymer, a semi-synthetic polymer, or a mixture thereof. The microcapsule may comprise one coating layer or many coating layers, of which the layers may be of the same material or different materials. In one embodiment, the coating material may comprise a polysaccharide or a mixture of saccharides and glycoproteins extracted from a plant, fungus, or microbe. Non-limiting examples include corn starch, wheat starch, potato starch, tapioca starch, cellulose, hemicellulose, dextrans, maltodextrin, cyclodextrins, inulins, pectin, mannans, gum arabic, locust bean gum, mesquite gum, guar gum, gum karaya, gum ghatti, tragacanth gum, funori, carrageenans, agar, alginates, chitosans, or gellan gum. In another embodiment, the coating material may comprise a protein. Suitable proteins include, but are not limited to, gelatin, casein, collagen, whey proteins, soy proteins, rice protein, and corn proteins. In an alternate embodiment, the coating material may comprise a fat or oil, and in particular, a high temperature melting fat or oil. The fat or oil may be hydrogenated or partially hydrogenated, and preferably is derived from a plant. The fat or oil may comprise glycerides, free fatty acids, fatty acid esters, or a mixture thereof. In still another embodiment, the coating material may comprise an edible wax. Edible waxes may be derived from animals, insects, or plants. Non-limiting examples include beeswax, lanolin, bayberry wax, carnauba wax, and rice bran wax. The coating material may also comprise a mixture of biopolymers. As an example, the coating material may comprise a mixture of a polysaccharide and a fat.

[0096] In an exemplary embodiment, the coating may be an enteric coating. The enteric coating generally will provide for controlled release of the ingredient, such that drug release can be accomplished at some generally predictable location in the lower intestinal tract below the point at which drug release would occur without the enteric coating. In certain embodiments, multiple enteric coatings may be utilized. Multiple enteric coatings, in certain embodiments, may be selected to release the ingredient or combination of ingredients at various regions in the lower gastrointestinal tract and at various times.

[0097] The enteric coating is typically, although not necessarily, a polymeric material that is pH sensitive. A variety of anionic polymers exhibiting a pH-dependent solubility profile may be suitably used as an enteric coating in the practice of the present invention to achieve delivery of the active to the lower gastrointestinal tract. Suitable enteric coating materials include, but are not limited to: cellulosic polymers such as hydroxypropyl cellulose, hydroxyethyl cellulose, hydroxypropyl methyl cellulose, methyl cellulose, ethyl cellulose, cellulose acetate, cellulose acetate phthalate, cellulose acetate trimellitate, hydroxypropylmethyl cellulose phthalate, hydroxypropylmethyl cellulose succinate and carboxymethylcellulose sodium; acrylic acid polymers and copolymers, preferably formed from acrylic acid, methacrylic acid, methyl acrylate, ammonio methylacrylate, ethyl acrylate, methyl methacrylate and/or ethyl methacrylate (e.g., those copolymers sold under the trade name “Eudragit”); vinyl polymers and copolymers such as polyvinyl pyrrolidone, polyvinyl acetate, polyvinylacetate phthalate, vinylacetate crotonic acid copolymer, and ethylene-vinyl acetate copolymers; and shellac (purified lac). In one embodiment, the coating may comprise plant polysaccharides that can only be digested in the distal gut by the microbiota. For instance, a coating may comprise pectic galactans, polygalacturonates, arabinogalactans, arabinans, or rhamnogalacturonans. Combinations of different coating materials may also be used to coat a single capsule.

[0098] The thickness of a microcapsule coating may be an important factor in some instances. For example, the “coating weight,” or relative amount of coating material per dosage form, generally dictates the time interval between oral ingestion and drug release. As such, a coating utilized for time release of the ingredient or combination of ingredients into the gastrointestinal tract is typically applied to a sufficient thickness such that the entire coating does not dissolve in the gastrointestinal fluids at pH below about 5, but does dissolve at pH about 5 and above. The thickness of the coating is generally optimized to achieve release of the ingredient at approximately the desired time and location.

[0099] As will be appreciated by a skilled artisan, the encapsulation or coating method can and will vary depending upon the ingredients used to form the pharmaceutical composition and coating, and the desired physical characteristics of the microcapsules themselves. Additionally, more than one encapsulation method may be employed so as to create a multi-layered microcapsule, or the same encapsulation method may be employed sequentially so as to create a multi-layered microcapsule. Suitable methods of microencapsulation may include spray drying, spinning disk encapsulation (also known as rotational suspension separation encapsulation), supercritical fluid encapsulation, air suspension microencapsulation, fluidized bed encapsulation, spray cooling/chilling (including matrix encapsulation), extrusion encapsulation, centrifugal extrusion, coacervation, alginate beads, liposome encapsulation, inclusion encapsulation, colloidosome encapsulation, sol-gel microencapsulation, and other methods of microencapsulation known in the art. Detailed information concerning materials, equipment and processes for preparing coated dosage forms may be found in Pharmaceutical Dosage Forms: Tablets, eds. Lieberman et al. (New York: Marcel Dekker, Inc., 1989), and in Ansel et al., Pharmaceutical Dosage Forms and Drug Delivery Systems, 6^{th} Ed. (Media, Pa.: Williams & Wilkins, 1995).

### DEFINITIONS

[0100] The term “activity of the microbiota population” refers to the microbiome's ability to harvest energy.

[0101] An “effective amount” is a therapeutically-effective amount that is intended to qualify the amount of agent that will achieve the goal of modulating an M. smithii gene product, promoting weight loss, or promoting weight gain.

[0102] As used herein, “gene product” refers to a nucleic acid derived from a particular gene, or a polypeptide derived from a particular gene. For instance, a gene product may be a mRNA, tRNA, rRNA, cDNA, peptide, polypeptide, protein, or metabolite.

[0103] “Metabolome” as used herein is defined as the network of enzymes and their substrates and biochemical products, which operate within subject or microbial cells under various physiological conditions.

[0104] As used herein, the term “pharmaceutically acceptable salt” refers to those salts which are, within the scope of sound medical judgment, suitable for use in contact with the tissues of humans and other subjects without undue toxicity, irritation, allergic response and the like, and are commensurate with a reasonable benefit/risk ratio. Pharmaceutically acceptable salts are well known in the art. For example, S. M. Berge, et al. describe pharmaceutically acceptable salts in detail in J. Pharmaceutical Sciences, 66: 1 19 (1977), incorporated herein by reference. The salts can be prepared in situ during the final isolation and purification of the composition of the invention, or separately by reacting the free base function with a suitable organic acid. Non-limiting examples of pharmaceutically acceptable, nontoxic acid addition salts are salts of an amino group formed with inorganic acids such as hydrochloric acid, hydrobromic acid, hydroionic acid, nitric acid, carbonic acid, phosphoric acid, sulfuric acid and perchloric acid.

[0105] As used herein, the “subject” may be, generally speaking, an organism capable of supporting M. smithii in its gastrointestinal tract. For instance, the subject may be a rodent or a human. In one embodiment, the subject may be a rodent, i.e. a mouse, a rat, a guinea pig, etc. In an exemplary embodiment, the subject is human.

[0106] “Transcriptome” as used herein is defined as the network of genes that are being actively transcribed into mRNA in subject or microbial cells under various physiological conditions.

[0107] The phrase “weight gain related disorder” includes disorders resulting from, at least in part, obesity. Representative disorders include metabolic syndrome, type II diabetes, hypertension, cardiovascular disease, and nonalcoholic fatty liver disease. The phrase “weight loss related disorder” includes disorders resulting from, at least in part, weight loss. Representative disorders include malnutrition and cachexia.

[0108] As various changes could be made in the above compounds, products and methods without departing from the scope of the invention, it is intended that all matter contained in the above description and in the examples given below, shall be interpreted as illustrative and not in a limiting sense.

### EXAMPLES

[0109] The following examples illustrate various iterations of the invention.

### Materials and Methods for Examples 1-5

### Genome Sequencing and Annotation

[0110] Methanobrevibacter smithii strain PS (ATCC 35061) was grown as described below for 6d at 37° C. DNA was recovered from harvested cell pellets using the QIAGEN Genomic DNA Isolation kit with mutanolysin (1 unit/mg wet weight cell pellet; Sigma) added to facilitate lysis of the microbe. An ABI 3730xl instrument was used for paired end-sequencing of inserts in a plasmid library (average insert size 5 Kb; 42,823 reads; 11.6×-fold coverage), and a fosmid library (average insert size of 40 Kb; 7,913 reads; 0.6×-fold coverage). Phrap and PCAP (Huang et al. (2003) Genome Res 13:2164-70) were used to assemble the reads. A primer-walking approach was used to fill-in sequence gaps. Physical gaps and regions of poor quality (as defined by Consed; Gordon et al., (1998) Genome Res. 8, 195-202) were resolved by PCR-based re-sequencing. The assembly's integrity and accuracy was verified by clone constraints. Regions containing insufficient coverage or ambiguous assemblies were resolved by sequencing spanning fosmids. Sequence inversions were identified based on inconsistency of constraints for a fraction of read pairs in those regions. The final assembly consisted of 12.6× sequence coverage with a Phred base quality value 40. Open-reading frames (ORFs) were identified and annotated as described below.

### Quantitative RT-PCR Analyses

[0111] All experiments using mice were performed using protocols approved by the animal studies committee of Washington University. Gnotobiotic male mice belonging to the NMRI inbred strain (n=5-6/group/experiment) were colonized with either M. smithii (14d) or B. thetaiotaomicron (28d) alone, or first with B. thetaiotaomicron for 14d followed by co-colonization with M. smithii. All mice were sacrificed at 12 weeks of age. Cecal contents from each mouse were flash frozen, and stored at −80° C. RNA was extracted from an aliquot of the harvested cecal contents (100-300 mg) and used to generate cDNA for qRT-PCR assays. qRT-PCR data were normalized to 16S rRNA (ΔΔC_{T} method) prior to comparing treatment groups. PCR primers are listed in Table 14. All amplicons were 100-150 bp.

### Biochemical Assays

[0112] Perchloric acid-, hydrochloric acid-, and alkali extracts of freeze dried cecal contents were prepared, and established pyridine nucleotide-linked microanalytic assays (Passonneau et al., (1993) Enzymatic Analysis: A practical guide) used to measure metabolites.

### Microbes and Culturing

[0113] All M. smithii strains [PS (ATCC 35061), ALI (DSMZ 2375), B181 (DSMZ 11975), and F1 (DSMZ 2374)] were cultivated in 125 ml serum bottles containing 15 ml MBC medium supplemented with 3 g/L formate, 3 g/L acetate, and 0.3 mL of a freshly prepared anaerobic solution of filter-sterilized 2.5% Na₂S (Samuel et al., (2006) PNAS 103:10011-6). The remaining volume in the bottle (headspace) contained a 4:1 mixture of H₂ and CO₂: the headspace was replenished every 1-2d for a 6d growth at 37° C.

[0114] M. smithii PS was also cultured in a BioFlor-110 batch fermentor with dual 1.5 L fermentation vessels (New Brunswick Scientific). Each vessel contained 750 ml of supplemented MBC medium. One hour prior to inoculation, 7.5 ml of sterile 2.5% Na₂S solution was added to the vessel, followed by one half of the contents of a serum bottle culture that had been harvested on day 5 of growth. Microbes were then incubated at 37° C. under a constant flow of H₂/CO₂ (4:1) (agitation setting, 250 rpm). One milliliter of a sterile solution of 2.5% Na₂S was added daily.

Colonization of Germ-Free Mice with M. smithii PS with and without B. thetaiotaomicron VPI-5482

[0115] Mice belonging to the NMRI/KI inbred strain (Bry et al., (1996) Science 273:1380-3) were housed in gnotobiotic isolators (Hooper et al., (2002) Mol Cell Micro 31:559-589) where they were maintained under a strict 12 h light cycle (lights on at 0600 h) and fed a standard, autoclaved, polysaccharide-rich chow diet (B&K Universal, East Yorkshire, UK) ad libitum. Each mouse was inoculated at age 8 weeks with a single gavage of 10⁸ microbes/strain [B. thetaiotaomicron was harvested from an overnight culture in TYG medium (Sonnenburg et al., Science 307:1955-9); M. smithii from serum bottles containing MBC medium after a 5d incubation at 37° C. (Samuel et al., (2006) PNAS 103:10011-6)]. For a given experiment, the same preparation of cultured microbes was used for mono-association (single species added) and co-colonization (both species added).

[0116] Immediately after animals were sacrificed, cecal contents were recovered for preparation of DNA, RNA and biochemical studies (n=5 mice/treatment group/experiment; n=3 independent experiments). Colonization density was assessed using a qPCR-based assay employing species-specific primers, as described in Samuel et al., (2006) PNAS 103:10011-6.

### Genome Annotation

[0117] M. smithii genes were identified by comparing outputs from GLIMMER v.3.01 (Delcher et al., (1999) Nucleic Acids Res 27:4636-41), CRITICA v.1.05b (Badger et al., (1999) Mol Biol Evol 16:512-24), and GeneMarkS v.2.1 (Besemer et al. (2001) Nucleic Acids Res 29:2607-18). WUBLAST (http://blast.wustl.edu/) was then used to identify all ORFs with significant hits to the NR database (as of Dec. 1, 2006). ORFs containing <30 codons and without significant homology (e-value threshold of 10⁻⁵) to other proteins, were eliminated. rRNA and tRNA genes were identified using BLASTN and tRNA-Scan (Lowe et al., (1997) Nucleic cids Res 25:955-64). Annotation of the predicted proteome of M. smithii was completed by using BLAST homology searches against public databases, and domain analysis with Pfam (http://pfam.janelia.org/) and InterProScan [release 12.1; (Apweiler et al., Nucleic Acids Res 29:37-40)]. Functional classifications were made based on GO terms assigned by InterProScan and homology searches against COGs (Tatusov et al., (2001) Nucleic Acids Res 29:22-8), followed by manual curation. Metabolic pathways were constructed based on KEGG (Kanehisa et al., (2004) Nucleic Acids Res 32:D277-80) and MetaCyc [(Caspi et al., (2006) Nucleic Acids Res 34:D511-6); http://metacyc.org/)]. Glycosyltransferases (GT) were categorized according to CAZy [http://www.cazy.org; (Coutinho et al., (1999) Recent Advances in Carbohydrate Bioengineering p. 3-12)]. Putative prophage genes were identified using two independent approaches: (i) BLASTN of predicted M. smithii ORFs against a database of all known phage sequences (http://phage.sdsu.edu/phage); and (ii) Hidden Markov Model (HMM)-based analysis using Phage_Finder (Fouts (2006) Nucleic Acids Res 34:5839-51).

### Comparative Genomic Analyses

[0118] GO term assignments—The number of genes in each archaeal genome that were assigned to each GO term, or to its parents in the GO hierarchy [version available on Jun. 6, 2006; (Ashburner et al., (2000) Nat Genet. 25:25-9)] were totaled. All terms assigned to at least five genes in a given genome were then subjected to statistical tests for overrepresentation, and all terms with a total of five genes across all tested genomes for under-representation, using a binomial comparison reference set (see Table 6). Genes that could not be assigned to a GO category were excluded from the reference sets. A false discovery rate of <0.05 was set for each comparison (Benjamini et al., (1995) J of the Royal Statistical Society B 57:289-300). All tests were implemented using the Math::CDF Perl module (E. Callahan, Environmental Statistics, Fountain City, Wis.; available at http://www.cpan.org/), and scripts written in Perl.

[0119] Percent identity comparisons—The M. smithii PS genome sequence was compared to the M. stadtmanae genome (Fricke et al., (2006) J Bacteriol 188:642-58) and a 78 Mb metagenomic dataset of the human fecal microbiome (Gill et al., (2006) Science 312:1355-9) using NUCmer (part of MUMmer v.3.19 package; (Kurtz et al., Genome Biol 5:R12), and a percent identity plot was generated using Mummerplot.

[0120] Genomic synteny—Comparisons of synteny between M. smithii and M. stadtmanae were completed using the Artemis Comparison Tool (Carver et al., (2005) Bioinformatics 21:3422-3) set to tBLASTX and the most stringent confidence level.

[0121] M. smithii interaction network analyses—All M. smithii COGs were submitted to the STRING database (http://string.embl.de/; (von Mering et al., (2003) Nucleic Acids Res 31:258-61) to create predicted interaction networks (0.95 confidence interval). The program Medusa (Hooper et al., (2005) Bioinformatics 21:4432-3) was then used to organize the networks and color the nodes based on their conservation in M. smithii's proteome (mutual best BLASTP hits with e-values<10⁻²⁰ to the other Methanobacteriales genomes).

[0122] Clustering of adhesin-like proteins—M. smithii and M. stadtmanae ALPs were first aligned using CLUSTALW (v.1.83; (Chenna et al., (2003) Nucleic Acids Res 31:3497-500)). To retain the highest level of discrimination between the proteins, the alignment was subsequently converted into a nucleotide alignment using PAL2NAL (Suyama et al., (2006) Nucleic Acids Res 34:W609-12). The resulting alignment was used to create a maximum likelihood tree with RA×ML [Randomized accelerated maximum likelihood for high performance computing [RA×ML-VI-HPC, v2.2.1; (Stamatakis (2006) Bioinformatics 22:2688-90)] first using the GTR+CAT approximation method for rapid generation of tree topology, followed by the GTR+gamma evolutionary model for determination of likelihood values. ModelTest (v3.7; http://darwin.uvigo.es/software/modeltest.html) also identified GTR+gamma as the most appropriate evolutionary model for the dataset. Bootstrap values were determined from 100 neighbor-joining trees in Paup (v. 4.0b10, http://paup.csit.fsu.edu/). Tree visualization was completed with TreeView (Page (1996) Comput Appl Biosci 12:357-8).

Functional Genomic Analysis of M. smithii Gene Expression in Gnotobiotic Mice

[0123] RNA isolation—100-300 mg aliquots of frozen cecal contents from each gnotobiotic mouse was added to 2 ml tubes containing 250 μl of 212-300 μm-diameter acid-washed glass beads (Sigma), 500 μl of buffer A (200 mM NaCl, 20 mM EDTA), 210 μl of 20% SDS, and 500 μl of a mixture of phenol:chloroform:isoamyl alcohol (125:24:1; pH 4.5; Ambion). Samples were lysed using a bead beater (BioSpec; ‘high’ setting for 5 min at room temperature) and cellular debris was pelleted by centrifugation (10,000×g at 4° C. for 3 min). The extraction was repeated by adding another 500 μL of phenol:chloroform:isoamyl alcohol to the aqueous supernatant. RNA was precipitated from the pooled aqueous phases, resuspended in 100 μl nuclease-free water (Ambion), 350 μl Buffer RLT (QIAGEN) was added, and RNA further purified using the RNeasy mini kit (QIAGEN).

Analysis of the Sialic Acid Production by M. smithii

[0124] Reverse-phase HPLC analysis of cellular extracts—M. smithii was cultured in MBC medium, in a batch fermenter, to stationary phase (6d incubation). Cells were collected by centrifugation, washed three times in PBS, snap frozen in liquid nitrogen, and stored at −80° C. Sialic acid content was assayed using established protocols (Manzi et al., (1995) Current Protocols in Molecular Biology)). Briefly, sialic acids were liberated by homogenization of the cell pellet (˜30-50 mg wet weight) in 0.5 ml of 2M acetic acid with subsequent incubation of the homogenate for 3 h at 80° C. Samples were filtered through Microcon 10 filters (Millipore) and the filtrate, containing free sialic acid, was dried (speed-vacuum). The released sialic acid was derivatized with DMB (1,2-diamino-4,5-methylene-dioxybenzene) to yield a fluorescent adduct, which was analyzed by C18 reverse phase high-pressure liquid chromatography (RP-HPLC; Dionex DX-600 workstation). Sialic acid was quantified by comparison to known amounts of derivatized standards [N-acetylneuraminic acid (Neu5Ac) and Nglycolylneuraminic acid (Neu5Gc)], and blanks (buffer alone).

[0125] Histochemical studies—M. smithii strains PS and F1 were grown in MBC as above. Bacteroides thetaiotaomicron VPI-5482, and Bifidobacterium longum NCC2705 were grown under anaerobic conditions in TYG medium to stationary phase and used as negative controls. Escherichia coli strain K92 (ATCC 35860), which is known to produce sialic acid (Egan et al., (1977) Biochemistry 16:3687-92), was incubated in 1419 medium (ATCC) to stationary phase and used as a positive control. All strains were fixed in 1.5 ml conical plastic tubes in either 4% paraformaldehyde or 100% ethanol for at least 8 h at 4° C. Samples were then washed with PBS and stored at −20° C. in 50% ethanol, 20 mM Tris and 0.1% IGEPAL CA-630 (Sigma; prepared in deionized water) until assayed. Samples were diluted in deionized water, placed on coated glass slides (Cel-Line/Erie Scientific Co.), air-dried, dehydrated in graded ethanols (50%, 80%, 100%), treated with blocking buffer (0.3% Triton X-100, 1% BSA in PBS; 30 min at room temperature), and then incubated with 10 μg/ml fluorescein-labeled Sambucus nigra lectin (SNA; Vector Laboratories; specificity, Neu5Acα-2,6Gal/GalNAc epitopes) for 1 h at room temperature. Slides were subsequently washed with PBS, stained with 4′,6-diamidino-2-phenylindole (DAPI, 2 μg/ml; 5 min at room temperature), washed with de-ionized water, and mounted in PBS/glycerol. Slides were visualized with an Olympus BX41 microscope and photographed using a Q Imaging QICAM camera and OpenLab software (Improvision, Inc., v.3.1.5).

Transmission Electron Microscopy (TEM) of M. smithii.

[0126] Cells were harvested at day 6 of growth in the batch fermentor, and cellular morphology was defined by TEM using methods identical to those described previously for B. thetaiotaomicron (Sonnenburg et al., (2005) Science 307:1955-9). TEM studies of M. smithii present in the ceca of gnotobiotic mice that had been colonized for 14d with the archaeon were conducted using the same protocol.

Microanalytic Biochemical Analyses of Cecal Samples Recovered from Gnotobiotic Mice

[0127] Extraction of metabolites from cecal contents—For measurement of ammonia and urea levels, perchloric acid extracts were prepared from 2 mg of freeze-dried cecal contents. [Contents were collected with a 10 μl inoculation loop, quick frozen in liquid nitrogen, and lyophilized at −35° C.] The lyophilized sample was homogenized in 0.2 ml of 0.3M perchloric acid at 1° C.

[0128] For the remaining metabolites, alkali and acid extracts were prepared from 4 mg of dried cecal samples that were homogenized in 0.4 ml 0.2M NaOH at 1° C. For the alkali extract, an 80 μl aliquot was removed, heated for 20 min at 80° C. and then neutralized with 80 μl of 0.25M HCl and 100 mM Tris base. For the acid extract, a 60 μl aliquot was removed and added to 20 μl 0.7M HCl, heated for 20 min at 80° C., and then neutralized with 40 μl 100 mM Tris base. Protein content was determined in the alkali extracts using the Bradford method (Bio Rad).

[0129] Metabolite assays—The sample concentrations for ammonium and urea were high enough so that direct fluorometric measurements could be used for detection. However, to measure the low sample concentrations for asparagine, glutamate, glutamine, α-ketoglutarate and ethanol, protocols were adapted from previously established pyridine nucleotide-linked assays, an “oil well” technique, and enzymatic cycling amplification (Passonneau et al., (1993) Enzymatic Analysis: A Practical Guide). All chemicals and enzymes were from Sigma unless otherwise noted.

[0130] Ammonium and Urea: For measurement of ammonium, a 20 μl aliquot of a perchloric acid extract of a given sample of cecal contents was added to 1 ml of a solution containing 50 mM imidazole HCl (pH 7.0), 0.2 mM α-ketoglutarate, 0.5 mM EDTA, 0.02% BSA, 10 μM NADH, and 10 μg/ml beef liver glutamate dehydrogenase (in glycerol; specific activity, 40 units/mg protein). Following a 40 min incubation at 24° C., fluorescence was measured using a Ratio-3 system filter fluorometer (Farrand Optical Components and Instruments, Valhalla, N.Y.; excitation at 360 nm; emission at 460 nm). Sample blanks were run that lacked added glutamate dehydrogenase. Ammonium acetate standards were carried throughout all steps.

[0131] To measure urea concentrations, 2 μl of a 50 mg/ml solution of Jack bean urease (50 units/mg) was added to the same sample used to determine ammonium levels. Following a 40 min incubation at 24° C., urea levels were defined based on a further reduction in fluorescence. Control sample blanks lacked added urease. Reference urea standards were carried throughout all steps.

[0132] Asparagine: A 0.5 μl aliquot of the alkali extract of a given sample of cecal contents was added to 0.5 μl of a solution containing 50 mM Trizma HCl (pH 8.7), 0.04% BSA, and 4 μg/ml E. coli asparaginase (160 units/mg protein). Sample blanks lacked added asparaginase. After a 30 min incubation at 24° C., 2 μl of a solution containing 50 mM Trizma HCl (pH 8.1), 10 μM α-ketoglutarate, 10 μM NADH, 4 mM freshly prepared ascorbic acid, 10 μg/ml of pig heart glutamic-oxalacetic transaminase (220 units/mg protein), plus 5 μg/ml beef heart malic dehydrogenase (2800 units/mg protein) was added, and the resulting mixture was incubated for 30 min at 24° C. One microliter of 0.25M HCl was then introduced. After a 10 min incubation at 24° C., a 2 μl aliquot of the reaction mixture was transferred to 0.1 ml of NAD cycling reagent for 20,000 cycles of amplification and the amplified product measured according to methods described by Passonneau and Lowry ((1993) Enzymatic Analysis: A Practical Guide). Sample blanks lacked added asparaginase. Reference asparagine standards were carried throughout all steps.

[0133] Glutamate and Glutamine: A 0.1 μl aliquot from an acid extract of a given sample of cecal contents was added to 0.1 μl of reagent containing 100 mM Na acetate (pH 4.9), 20 mM HCl, 0.4 mM EDTA and 50 μg/ml E. coli glutaminase (780 units/mg protein). Another 0.1 μl aliquot of the cecal contents was added to the same reagent in a parallel reaction that lacked added glutaminase (to measure glutamate alone). Following a 60 min incubation at 24° C., 2 μl of a solution containing 50 mM Tris acetate (pH 8.5), 0.1 mM NAD+, 0.1 mM ADP and 50 μg/ml beef liver glutamate dehydrogenase (120 units/mg protein; Roche) was added to both reaction mixtures, which were subsequently incubated for 30 min at 24° C. The reactions were terminated by addition of 1 μl of 0.2M NaOH and then heated for 20 min at 80° C. A 2 μl aliquot was subsequently transferred to 0.1 ml NAD cycling reagent and subjected to 20,000 cycles of amplification. Reference glutamine and glutamate standards were carried throughout all steps.

[0134] α-Ketoglutarate—A 0.5 μl aliquot from an given alkali extract was added to 0.5 μl of reagent containing 100 mM imidazole acetate (pH 6.5), 0.04% BSA, 50 mM ammonium acetate, 0.2 mM ADP, 4 mM ascorbic acid (freshly prepared), 40 μM NADH and 20 μg/ml beef liver glutamate dehydrogenase (120 units/mg protein; Roche). Following a 30 min incubation at 24° C., the reaction was terminated by adding 0.5 μl of 0.2M HCl. A 1 μl aliquot was transferred to 0.1 ml NAD cycling reagent and subjected to 30,000 cycles of amplification. α-Ketoglutarate standards were carried throughout all steps.

[0135] Ethanol: A 0.5 μl aliquot of an acid extract from cecal contents was added to 0.5 μl of a solution consisting of 5 mM Tris HCl (pH 8.1), 0.04% BSA, 0.1 mM NAD+, and 20 μg/ml yeast alcohol dehydrogenase (350 units/mg protein). Following a 60 min incubation at 24° C., 1 μl of 0.15M NaOH was added and the mixture heated for 20 min at 80° C. A 0.5 μl aliquot of this reaction mixture was transferred to 0.1 ml of NAD cycling reagent and amplified 5000-fold. Ethanol standards were carried throughout all steps.

Whole Genome Genotyping with Custom M. smithii Gene Chips

[0136] GeneChips were manufactured by Affymetrix (http://www.affymetrix.com), based on the sequence of the PS strain genome (see Table 13 for details of the GeneChip design). Duplicate cultures of M. smithii strains PS (ATCC 35061), F1 (DSMZ 2374), ALI (DSMZ 2375) and B181 (DSMZ 11975), were grown in 125 ml serum bottles as described above. Genomic DNA was prepared from each strain using the QIAGEN Genomic DNA Isolation kit: mutanolysin (Sigma; 2.5 U/mg wet wt. cell pellet) was added to facilitate lysis of the microbes. DNA (5-7 μg) was further purified by phenolchloroform extraction and then sheared by sonication to <200 bp, labeled with biotin (Enzo BioArray Terminal Labeling Kit), denatured at 95° C. for 5 min, and hybridized to replicate GeneChips using standard Affymetrix protocols (http://www.affymetrix.com). M. smithii genes represented on the GeneChip were called “Present” or “Absent” by DNA-Chip Analyzer v1.3 (dChip; www.biostat.harvard.edu/complab/dchip/) using modeled (PM/MM ratio) data.

### Statistical Analysis

[0137] Pairwise comparisons were made using unpaired Student's t-test. One-way ANOVA, followed by Tukey's post hoc multiple comparison test, was used to determine the statistical significance of differences observed between three groups.

### Development of PHAT (Pressurized Heated Anaerobic Tank) System

[0138] A system for culturing M. smithii in 96-well plate format was designed and constructed in the following manner (See FIG. 15). Three stainless steel paint canisters (Binks, 83S-210, 2 gallon size) were modified for incubation of plates at 37° C. in an oxygen-free gas mix of 20% CO₂/80% H₂ at a pressure of 30 psi, where all of these growth parameters can be monitored and recorded.

[0139] The canisters are heated using Electro-Flex Heat brand Pail Heaters controlled by a custom designed controller consisting of a 16A2120 temperature/process control (Love Controls), an RTD (resistance temperature detector) probe to measure internal tank temperature, and several safety features to prevent overheating or burns.

[0140] The system is pressurized with oxygen-free gas that has flowed through a custom-built oxygen scrub. Commercially available gas mixes used for culturing M. smithii contain trace levels of oxygen that would kill the organism: thus, the gas mixture must be passed through an oxygen scrub. This scrub consists of a glass tube filled with copper mesh that is heated to 350° C. with heating tape (HTS/Amptek Duo-Tape), controlled by a benchtop power controller (HTS/Amptek BT-Z). The oxygen scrub is covered with insulating tape and secured behind a heat resistant polyetherimide case. Pressure in each tank is measured and recorded with a digital manometer (LEO record, Omni Instruments).

[0141] The system is housed inside an anaerobic chamber (COY laboratories) to allow inspection and manipulation of cultures and plates without exposing M. smithii to oxygen. Each tank can house 30 standard volume 96-well plates, which can be analyzed inside the COY anaerobic chamber with a microplate reader (BioRad) that monitors growth by measuring optical density.

### Statin Susceptibility

[0142] Stock solutions (100×) of atorvastatin were prepared in methanol, pravastatin in ethanol, and rosuvastatin in DMSO (dimethyl sulfoxide) to concentrations of 100 mM, 10 mM and 1 mM. 1.5 μl of the stock solutions were added to wells in 96-well plates and transferred to the COY anaerobic chamber where they were kept for at least 24 hours to become anaerobic. 150 microliters of actively growing Methanobrevibacter smithii cultures were then added to each well (excluding medium+drug blanks) to bring the drug concentrations to 1 mM, 100 μM and 10 μM, respectively. The plates were incubated in the newly developed pressurized heated anaerobic tank system in a 4:1 mixture of oxygen-scrubbed H₂ and CO₂ at a pressure of 30 psi. Cultures grown in 1% ethanol, methanol and DMSO were used as controls. Growth was measured by determining optical density at 600 nm using the BioRad microplate reader (model 680).

[0143] Starting cultures of M. smithii strains [DSMZ 861 (PS), 2374 (F1), 2375 (ALI) and 11975 (B181)] were grown in 96 well plates in 150 μl volume/well of Methanobrevibacter complex medium (MBC) supplemented with 3 g/liter formate, 3 g/liter acetate, and 33 ml/liter of 2.5% Na₂S (added just before use). Each condition was tested in triplicate with the average measurement plotted.

### Example 1

### M. smithii Genome Description

[0144] The 1,853,160 base pair (bp) genome of the M. smithii type strain PS contains 1,795 predicted protein coding genes (Tables 1-4), 34 tRNAs, and two rRNA clusters. Some observations on the genome itself are as follows:

Elements that Affect Genome Evolution

[0145] The M. smithii PS genome contains multiple elements that can influence genome evolution, including 30 transposases, an integrated prophage (˜38 kb; MSM1640-92), eight insertion sequence (IS) elements, 16 genes involved in DNA repair, 9 restriction-modification (R-M) system subunits, and four predicted integrases (Table 4).

[0146] Several lytic phages have been reported to infect M. smithii, including a 69 kb linear phage known as PG that belongs to the ψM1-like viruses (Prangishvili et al. (2006) Virus Res 117:52-67), and another 35 kb phage (PMS11; Calendar (2005) The Bacteriophages). The PG phage is AT-rich, heavily nicked, and lytic (burst size, 30-90), with a latent period of 3-4 h (Bertani et al. (1985) EMBO Workshop on Molecular Genetics of Archaebacteria and the International Workshop on Biology and Biochemistry of Archaebacteria, pg. 398). BLAST comparisons of the 52 predicted genes in the integrated prophage of M. smithii PS against known phage genes revealed only a few homologs (Table 15). One of the prophage genes (MSM1691) encodes a pseudomurein endoisopeptidase (PeiW): this enzyme may function to cleave M. smithii's cell wall and contribute to autolysis, as related enzymes in a defective Methanothermobacter wolfeii prophage have been shown to do (Luo et al., FEMS Microbiology Letters 208:47-51). The specific ends of the prophage genome could not be identified, and further studies are needed to determine whether the prophage is active and lytic.

[0147] The eight insertion sequence (IS) elements in M. smithii's genome (Table 4) range in length from 137 bp (MSM1519) to 1013 bp (MSM0527) and all are ISM1 (family ISNCY) according to ISfinder (Siguier et al., (2006) Nucleic Acids Res 34:D32-6; http://www-is.biotoul.fr/). ISM1 is a mobile IS element (Hamilton and Reeve (1985) Molecular Genetics and Genomics 200:47-59). IS elements promote genome evolution and plasticity through recombination, gene loss and, potentially, lateral gene transfer (Brugger et al., (2002) FEMS Microbiol Lett 206:131-41).

### Transcriptional Regulation

[0148] M. smithii PS contains 60 predicted transcriptional regulators, including homologs of known nutrient sensors [e.g., a HypF family member (maturation of hydrogenases), a PhoU family member (phosphate metabolism), and a NikR family member (nickel)], plus five regulators of amino acid metabolism (Table 3). However, several GO categories related to environmental sensing and regulation (e.g., two-component systems; GO:0000160) are significantly depleted in its proteome compared to the proteomes of methanogens that live in terrestrial or aquatic environments (Table 6). In contrast, B. thetaiotaomicron, which uses complex, structurally diversified glycans as its principal nutrient source, possesses a large and diverse arsenal of nutrient sensors including 32 hybrid two-component systems plus 50 ECF-type sigma factors and 25 anti-sigma factors (Sonnenburg et al, (2006) PNAS 103:8834-9; Xu et al., (2003) Science 299:2074-6). This relative paucity of nutrient sensors may reflect the fact that M. smithii's niche is restricted, and its nutrient substrates are relatively small, readily diffusible molecules that may not require extensive machinery for their recognition.

### Bile Acid Detoxification

[0149] In humans, cholic and chenodeoxycholic acids are synthesized in the liver and during their enterohepatic circulation undergo transformation by the intestinal microbiota to an array of metabolites (Hylemon and Harder (1998) FEMS Microbiol Rev 22:475-88). Bile acids and their metabolites have microbicidal activity and a genetically engineered deficiency of the bile acid-activated nuclear receptor FXR leads to reduced bile acid pools and bacterial overgrowth (Inagaki et al., (2006) PNAS 103:3920-5). Both M. smithii and M. stadtmanae encode a sodium:bile acid symporter (MSM1078), a conjugated bile acid hydrolase (CBAH; MSM0986), a short chain dehydrogenase with homology to a 7α-hydroxysteroid dehydrogenase (MSM0021). This is consistent with in vitro studies of M. smithii that demonstrate it is not inhibited by 0.1% deoxycholic acid (Miller et al, (1982) Appl Environ Microbiol 43:227-32).

[0150] We compared the proteome of M. smithii with the proteomes of (i) Methanosphaera stadtmanae, a methanogenic Euryarchaeote that is a minor and inconsistent member of the human gut microbiota (Eckburg et al., (2005) Science 308:1635-38), (ii) nine ‘non-gut methanogens’ recovered from microbial communities in the environment, and (iii) these non-gut methanogens plus an additional 17 sequenced Archaea (‘all archaea’) (Table 5).

[0151] Compared to non-gut methanogens and/or all archaea, M. smithii and M. stadtmanae are significantly enriched (binomial test, p<0.01) for genes assigned to GO (gene ontology) categories involved in surface variation (e.g., cell wall organization and biogenesis, see below), defense (e.g., multi-drug efflux/transport), and processing of bacteria-derived metabolites (Tables 6 and 7).

[0152] The M. smithii and M. stadtmanae genomes exhibit limited global synteny (FIG. 4) but share 968 proteins with mutual best BLAST hit e-values≦10-20 (46% of all M. smithii proteins; Table 8). A predicted interaction network of M. smithii clusters of orthologous groups (COGs) based on STRING, a database of predicted functional associations between proteins (von Mering et al., (2003) Nucleic Acids Res 31:258-61), shows that it contains more COGs for persistence, improved metabolic versatility, and machinery for genomic evolution compared to M. stadtmanae (FIG. 5 and Table 9).

### Cell Surface Variation

[0153] The ability to vary capsular polysaccharide surface structures in vivo by altering expression of glycosyltransferases (GTs) is a feature shared among sequenced bacterial species that are prominent in the distal human gut microbiota (Sonnenburg et al., (2005) Science 307:1955-59; Sonnenburg et al., (2006) PNAS 103:8834-39; Mazmanian et al., (2005) Cell 122:107-118; Coyne et al., (2005) Science 307:1778-81). Transmission EM studies of M. smithii harvested from gnotobiotic mice after a 14 day colonization revealed that it too has a prominent capsule (FIG. 1A). The proteomes of both human gut methanogens also contain an arsenal of GTs [26 in M. smithii and 31 in M. stadtmanae; see Table 10 for a complete list organized based on the Carbohydrate Active enZyme (CAZy) classification scheme (http://www.cazy.org; (Coutinho et al., (1999) Recent Advances in Carbohydrate Bioengineering)]. Unlike the sequenced Bacteroidetes, which possess large repertoires of glycoside hydrolases (GH) and carbohydrate esterases (CE) not represented in the human ‘glycobiome’, neither gut methanogen has any detectable GH or CE family members (FIG. 1B). Both M. smithii and M. stadtmanae dedicate a significantly larger proportion of their ‘glycobiome’ to GT2 family glycosyltransferases than any of the sequenced nongut associated methanogens (binomial test; p<0.00005; FIG. 1B). These GT2 family enzymes have diverse predicted activities, including synthesis of hyaluronan, a component of human glycosaminoglycans in the mucosal layer.

[0154] Sialic acids are a family of nine-carbon sugars that are abundantly represented in human mucus- and epithelial cell surface-associated glycans (Vimr et al., (2004) Microbiol Mol Biol Rev 68:132-53). N-acetylneuraminic acid (Neu5Ac) is the predominant type of sialic acid found in our species. Unique among sequenced archaea, M. smithii has a cluster of genes (MSM1535-1540) that encode all enzymes necessary for de novo synthesis of sialic acid from UDP-N-acetylglucosamine (i.e. UDP-GlcNAc epimerase, Neu5Ac synthase, CMP-Neu5Ac synthetase, and a putative polysialtransferase) (FIG. 1C). qRT-PCR assays of RNAs prepared from the cecal contents of 12-week-old gnotobiotic mice that had been colonized for 14d with the archaeon alone, or with B. thetaiotaomicron for 14d followed by addition of M. smithii for 14d (n=5-6 mice/treatment group) revealed that this cluster of genes is expressed in vivo at equivalent levels in mono- and co-colonized mice (n=5-6 animals/group; Table 11). Biochemical analysis of extracts prepared from cultured M. smithii, plus histochemical staining of the microbe with the sialic-acid specific lectin, Sambucus nigra 1 agglutinin (SNA), confirmed the presence of Neu5Ac (FIG. 6A-C). Taken together, our findings indicate that M. smithii has developed mechanisms to decorate its surface with carbohydrate moieties that mimic those encountered in the glycan landscape of its intestinal habitat.

[0155] The genomes of both human gut methanogens also encode a novel class of predicted surface proteins that have features similar to bacterial adhesins (48 members in M. smithii and 37 in M. stadtmanae). A phylogenetic analysis indicated that each methanogen has a specific Glade of these Adhesin-Like Proteins (ALPs; FIG. 7A). A subset of the M. smithii ALPs has homology to pectin esterases (GO:0030599): this GO family, which is significantly enriched in this compared to other Archaea based on the binomial test (p<0.0005; Table 6), is associated with binding of chondroitin, a major component of mucosal glycosaminoglycans. Several other M. smithii ALPs have domains predicted to bind other sugar moieties (e.g. galactose-containing-glycans; FIG. 7A). Both methanogens also have ALPs with peptidase-like domains (see Table 12 for a complete list of InterPro domains).

[0156] We conducted qRT-PCR assays of cecal RNAs from the mono- and co-colonized gnotobiotic mice described above. The results revealed one ‘sugar-binding’ ALP (MSM1305) that was significantly upregulated in the presence of B. thetaiotaomicron, four that were suppressed (including one with a GAG binding domain), and two that exhibited no statistically significant alterations (FIG. 7B). Regulated expression of distinct subsets of ALPs may direct this methanogen to specific intestinal microhabitats where close association with saccharolytic bacterial partners could promote establishment and maintenance of syntrophic relationships: e.g., such intimate association is needed given the limited diffusion of H₂.

### Example 2

### Methanogenic and Non-Methanogenic Removal of Bacterial End-Products of Fermentation

[0157] Compared to other sequenced non-gut associated methanogens, M. smithii has significant enrichment of genes involved in utilization of CO₂, H₂ and formate for methanogenesis (GO:0015948; Table 6). They include genes that encode proteins involved in synthesis of vitamin cofactors used by enzymes in the methanogenesis pathway [methyl group carriers (F₄₃₀ and corrinoids); riboflavin (precursor for F₄₃₀ biosynthesis); and coenzyme M synthase (involved in the terminal step of methanogenesis)] (see Table 7 for a list of these genes, and FIG. 2A for the metabolic pathways). M. smithii also has an intact pathway for molybdopterin biosynthesis to allow for CO₂ utilization (FIG. 8). qRT-PCR assays demonstrated that while key central methanogenesis enzymes are constitutively expressed in the presence or absence of B. thetaiotaomicron [see Fwd (tungsten formylmethanofuran dehydrogenase), Hmd (methylene-H₄ MPT dehydrogenase) and Mcr (methyl-CoM reductase)], ribofuranosylaminobenzene 5′-phosphate (RFA-P)-synthase (RfaS, MSM0848), an essential gene involved in methanopterin biosynthesis is significantly upregulated with co-colonization (see FIG. 2A and Table 11 for qRT-PCR results). M. smithii also upregulates a formate utilization gene cluster (FdhCAB; MSM1403-5) for methanogenic consumption of this B. thetaiotaomicron-produced metabolite (Samuel and Gordon (2006) PNAS 103:10011-10016).

[0158] Our previous qRT-PCR and mass spectrometry studies revealed that co-colonization increased B. thetaiotaomicron acetate production [acetate kinase (BT3963) 9-fold upregulated vs. B. thetaiotaomicron-mono-associated controls; P<0.0005; n=4-5 animals/group (Samuel and Gordon (2006) PNAS 103:10011-10016)]. Although acetate is not converted to methane by M. smithii (Miller et al., (1982) Appl. Environ. Microbiol. 43:227-32), we found that its proteome contains an ‘incomplete reductive TCA cycle’ that would allow it to assimilate acetate [Acs (acetyl-CoA synthase, MSM0330), Por (pyruvate:ferredoxin oxidoreductase, MSM0560), Pyc (pyruvate carboxylase, MSM0765), Mdh (malate dehydrogenase, MSM1040), Fum (fumarate hydratase, MSM0477, MSM0563, MSM0769, MSM0929), Sdh (succinate dehydrogenase, MSM1258), Suc (succinyl-CoA synthetase, MSMO228, MSM0924), and Kor (2-oxoglutarate synthase, MSM0925-8) in FIG. 2A]. qRT-PCR assays disclosed that co-colonization upregulated two important M. smithii genes associated with this pathway that participate in acetate assimilation: Por (pyruvate:ferredoxin oxidoreductase) as well as Cab (carbonic anhydrase, MSM0654), which converts CO₂ to bicarbonate, the substrate for Por (FIG. 2B).

[0159] M. smithii also possesses enzymes that in other methanogens facilitate utilization of two other products of bacterial fermentation, methanol and ethanol (Fricke et al, J Bacteriol 188:642-58; Berk et al., (1997) Arch Microbiol 168:396-402). qRT-PCR assays showed that co-colonization significantly increased expression of a methanol:cobalamin methyltransferase (MtaB, MSM0515), an NADP-dependent alcohol dehydrogenase (Adh, MSM1381), and an F₄₂₀-dependent NADP reductase (Fno, MSM0049) [2.4±0.3, 2.3±0.4 and 3.7±0.4 fold vs. mono-associated controls, respectively; p<0.01; see FIG. 2A for pathway information and FIG. 2C for qRT-PCR results]. Follow-up biochemical studies confirmed a significant decrease in ethanol levels in the ceca of co-colonized mice [35±6 μmol/g total protein in cecal contents versus 11±2 μmol/g and 12±2 μmol/g in B. thetaiotaomicron and M. smithii mono-associated animals respectively; p<0.05; FIG. 2D]. Expression of B. thetaiotaomicron's alcohol dehydrogenases (BT4512 and BT0535) is not altered by co-colonization (Samuel and Gordon (2006) PNAS 103:10011-10016), indicating that the reduction in cecal ethanol levels observed in co-colonized mice is not due to diminished bacterial production but rather to increased archaeal consumption.

[0160] Collectively, these findings indicate that M. smithii supports methanogenic and non-methanogenic removal of diverse bacterial end-products of fermentation: this capacity may endow it with a great flexibility to form syntrophic relationships with a broad range of bacterial members of the distal human gut microbiota.

### Example 3

### M. smithii Utilization of Ammonia as a Primary Nitrogen Source

[0161] Subject metabolism of amino acids by glutaminases associated with the intestinal mucosa (Wallace (1996) J Nutr 126:1326 S), or deamination of amino acids during bacterial degradation of dietary proteins yields ammonia (Cabello et al., (2004) Microbiology 150:3527-46). The M. smithii proteome contains a transporter for ammonium (AmtB; MSMO234) plus two routes for its assimilation: (i) the ATP-utilizing glutamine synthetase-glutamate synthase pathway which has a high affinity for ammonium and thus is advantageous under nitrogen-limited conditions; and (ii) the ATP-independent glutamate dehydrogenase pathway which has a lower affinity for ammonium (Dumitru et al., (2003) Appl. Environ. Microbiol. 69:7236-41).

[0162] Microanalytic biochemical assays revealed a ratio of glutamine to 2-oxoglutarate concentration that was 32-fold lower in the ceca of co-colonized gnotobiotic mice compared to animals colonized with M. smithii alone, and 5-fold lower compared to B. thetaiotaomicron mono-associated subjects (p<0.0001; FIG. 2E). In addition, levels of several polar amino acids were also significantly reduced in mice with the saccharolytic bacterium and methanogen (FIG. 2F), providing additional evidence for a nitrogen-limited gut environment. qRT-PCR analyses established that many of the key M. smithii genes involved in ammonia assimilation are upregulated with co-colonization, particularly those in the high affinity glutamine synthetase-glutamate synthase pathway [GInA (glutamine synthetase, MSM1418); GltA/GltB (two subunits of glutamate synthase, MSM0027, MSM0368); FIG. 2A,G]. GeneChip analysis of the transcriptional responses of B. thetaiotaomicron to co-colonization with M. smithii indicated that it also upregulates a high affinity glutamine synthase [BT4339; 2.4-fold vs. B. thetaiotaomicron monoassociated mice; n=4-5 mice/group; p<0.001; (Samuel et al., (2006) PNAS 103:10011-10016)]. This prioritization of ammonium assimilation by B. thetaiotaomicron and M. smithii is accompanied by a decrease in cecal ammonium levels in co-colonized subjects (11.1±1.3 pmol/g dry weight of cecal contents vs. 14.4±0.6 in M. smithii- and 14.3±0.9 in B. thetaiotaomicron-monoassociated animals; n=5-15/group; p<0.05; FIG. 2H). Together, these studies indicate that ammonium provides a key source of nitrogen for M. smithii when it exists in isolation in the gut of gnotobiotic mice, and that it must compete with B. thetaiotaomicron for this nutrient resource.

### Example 4

### Considering Targets for Development of Anti-M. smithii Agents

[0163] Manipulation of the representation of M. smithii in our gut microbiota could provide a novel means for treating obesity. Functional genomics studies in gnotobiotic mice illustrate one way to approach the issue. For example, inhibitors exist for several M. smithii enzymes. A class of N-substituted derivatives of para-aminobenzoic acid (pABA) interfere with methanogenesis by competitively inhibiting ribofuranosylaminobenzene 5′-phosphate synthase [RfaS; MSM0848; (Dumitru et al., (2003) Appl. Environ. Microbiol. 69:7236-41)]. As noted above, this enzyme, which participates in the first committed step in synthesis of methanopterin, is upregulated with co-colonization (4.6±0.9 fold versus mono-associated controls; p<0.01; FIG. 2A).

[0164] Archaeal membrane lipids, unlike bacterial lipids, contain ether-linkages. A key enzyme in the biosynthesis of archaeal lipids is hydroxymethylglutaryl (HMG)-CoA reductase (MSMO227), which catalyzes the formation of mevalonate, a precursor for membrane (isoprenoid) biosynthesis (23). HMG-CoA reductase inhibitors (statins) inhibit growth of Methanobrevibacter species in vitro (23). qRT-PCR revealed that MSMO227 is expressed at high levels in vivo in the presence or absence of B. thetaiotaomicron (P>0.05; Table 11).

[0165] We designed a custom GeneChip containing probesets directed against 99.1% of M. smithii's 1795 known and predicted protein-coding genes (see Table 12 for details). This GeneChip was used to perform whole genome genotyping of M. smithii PS (control) plus three other strains recovered from the feces of healthy humans: F1 (DSMZ 2374), ALI (DSMZ 2375) and B181 (DSMZ 11975). Replicate hybridizations indicated that 100% of the open reading frames (ORFs) represented on the GeneChip were detected in M. smithii PS, while 90-94% were detected in the other strains, including the potential drug targets mentioned above (Table 2 and FIG. 3). Approximately 50% of the undetectable ORFs in each strain encode hypothetical proteins. The other undetectable genes are involved in genome evolution [e.g., recombinases, transposases, IS elements, and type II restriction modification (R-M) systems], or are components of a putative archaeal prophage in strain PS, or are related to surface variation, including several ALPs (e.g., MSM0057 and MSM1585-90; FIG. 7). Strains F1 and ALI also appear to lack redundant gene clusters encoding subunits of formate dehydrogenase (MSM1462-3) and methyl-CoM reductase (MSM0902-3) that are found in the PS strain (the latter cluster is also undetectable in strain B181). In addition, the only methanol utilization cluster present in the PS strain (MSM1515-8) was not detectable in strain F1 (Table 2).

[0166] To further assess the degree of nucleotide sequence divergence among M. smithii strains, we compared the sequenced PS type strain to a 78 Mb metagenomic dataset generated from the aggregate fecal microbial community genome (microbiome) of two healthy humans (Gill et al., (2006) Science 312:1355-59). Their sequenced microbiomes contained 92% of the ORFs in the type strain (Table 2), including the potential drug targets described above. Several R-M system gene clusters (MSM0157-8, MSM1743, MSM1746-7), a number of transposases, a DNA repair gene cluster (MSM0689-95), and all ORFs in the prophage were not evident in the two microbiomes. Sequence divergence was also observed in 33 of the 48 ALP genes plus two ‘surface variation’ gene clusters (MSM1289-1398 and MSM1590-1616) that encode 11 glycosyltransferases and 9 proteins involved in pseudomurein cell wall biosynthesis (FIG. 9). A redundant methyl-CoM reductase cluster (MSM0902-3), an F₄₂₀-dependent NADP oxidoreductase (MSM0049) involved in consumption of bacteria-derived ethanol, and two subunits of the bicarbonate ABC transporter (MSM0990-1; carbon utilization) exhibited heterogeneity in the M. smithii populations present in the gut microbiota of these two adults (Table 2 and FIG. 9).

### Example 5

### Effect of HMG-CoA Reductase Inhibitors Administration

[0167] The PHAT system was used to culture 4 strains of M. smithii (DSMZ 861 (PS), 2374 (F1), 2375 (ALI) and 11975 (B181)) in 96-well plate format, and to test their sensitivities to various HMG-CoA reductase inhibitors. Preliminary results indicate that atorvastatin (Lipitor®), pravastatin (Pravachol®) and rosuvastatin (Crestor®) inhibit all strains tested at concentrations of 1 millimolar. Atorvastatin and rosuvastatin also inhibit all strains at 100 micromolar concentrations (FIG. 10-13; Tables 16-19). None of these three statins had any affect on the growth of a dominant human gut-associated saccharolytic bacterium, Bacteroides thetaiotaomicron (FIG. 14).

TABLE A

| | | | | |
|---|---|---|---|---|
| MSM0001 | MSM0002 | MSM0003 | MSM0004 | MSM0005 |
| MSM0006 | MSM0007 | MSM0008 | MSM0009 | MSM0010 |
| MSM0011 | MSM0012 | MSM0013 | MSM0014 | MSM0015 |
| MSM0016 | MSM0017 | MSM0018 | MSM0019 | MSM0020 |
| MSM0021 | MSM0022 | MSM0023 | MSM0024 | MSM0025 |
| MSM0026 | MSM0027 | MSM0028 | MSM0029 | MSM0030 |
| MSM0031 | MSM0032 | MSM0033 | MSM0034 | MSM0035 |
| MSM0036 | MSM0037 | MSM0038 | MSM0039 | MSM0040 |
| MSM0041 | MSM0042 | MSM0043 | MSM0044 | MSM0045 |
| MSM0046 | MSM0047 | MSM0048 | MSM0049 | MSM0050 |
| MSM0051 | MSM0052 | MSM0053 | MSM0054 | MSM0055 |
| MSM0056 | MSM0057 | MSM0058 | MSM0059 | MSM0060 |
| MSM0061 | MSM0062 | MSM0063 | MSM0064 | MSM0065 |
| MSM0066 | MSM0067 | MSM0068 | MSM0069 | MSM0070 |
| MSM0071 | MSM0072 | MSM0073 | MSM0074 | MSM0075 |
| MSM0076 | MSM0077 | MSM0078 | MSM0079 | MSM0080 |
| MSM0081 | MSM0082 | MSM0083 | MSM0084 | MSM0085 |
| MSM0086 | MSM0087 | MSM0088 | MSM0089 | MSM0090 |
| MSM0091 | MSM0092 | MSM0093 | MSM0094 | MSM0095 |
| MSM0096 | MSM0097 | MSM0098 | MSM0099 | MSM0100 |
| MSM0101 | MSM0102 | MSM0103 | MSM0104 | MSM0105 |
| MSM0106 | MSM0107 | MSM0108 | MSM0109 | MSM0110 |
| MSM0111 | MSM0112 | MSM0113 | MSM0114 | MSM0115 |
| MSM0116 | MSM0117 | MSM0118 | MSM0119 | MSM0120 |
| MSM0121 | MSM0122 | MSM0123 | MSM0124 | MSM0125 |
| MSM0126 | MSM0127 | MSM0128 | MSM0129 | MSM0130 |
| MSM0131 | MSM0132 | MSM0133 | MSM0134 | MSM0135 |
| MSM0136 | MSM0137 | MSM0138 | MSM0139 | MSM0140 |
| MSM0141 | MSM0142 | MSM0143 | MSM0144 | MSM0145 |
| MSM0146 | MSM0147 | MSM0148 | MSM0149 | MSM0150 |
| MSM0151 | MSM0152 | MSM0153 | MSM0154 | MSM0155 |
| MSM0156 | MSM0157 | MSM0158 | MSM0159 | MSM0160 |
| MSM0161 | MSM0162 | MSM0163 | MSM0164 | MSM0165 |
| MSM0166 | MSM0167 | MSM0168 | MSM0169 | MSM0170 |
| MSM0171 | MSM0172 | MSM0173 | MSM0174 | MSM0175 |
| MSM0176 | MSM0177 | MSM0178 | MSM0179 | MSM0180 |
| MSM0181 | MSM0182 | MSM0183 | MSM0184 | MSM0185 |
| MSM0186 | MSM0187 | MSM0188 | MSM0189 | MSM0190 |
| MSM0191 | MSM0192 | MSM0193 | MSM0194 | MSM0195 |
| MSM0196 | MSM0197 | MSM0198 | MSM0199 | MSM0200 |
| MSM0201 | MSM0202 | MSM0203 | MSM0204 | MSM0205 |
| MSM0206 | MSM0207 | MSM0208 | MSM0209 | MSM0210 |
| MSM0211 | MSM0212 | MSM0213 | MSM0214 | MSM0215 |
| MSM0216 | MSM0217 | MSM0218 | MSM0219 | MSM0220 |
| MSM0221 | MSM0222 | MSM0223 | MSM0224 | MSM0225 |
| MSM0226 | MSM0227 | MSM0228 | MSM0229 | MSM0230 |
| MSM0231 | MSM0232 | MSM0233 | MSM0234 | MSM0235 |
| MSM0236 | MSM0237 | MSM0238 | MSM0239 | MSM0240 |
| MSM0241 | MSM0242 | MSM0243 | MSM0244 | MSM0245 |
| MSM0246 | MSM0247 | MSM0248 | MSM0249 | MSM0250 |
| MSM0251 | MSM0252 | MSM0253 | MSM0254 | MSM0255 |
| MSM0256 | MSM0257 | MSM0258 | MSM0259 | MSM0260 |
| MSM0261 | MSM0262 | MSM0263 | MSM0264 | MSM0265 |
| MSM0266 | MSM0267 | MSM0268 | MSM0269 | MSM0270 |
| MSM0271 | MSM0272 | MSM0273 | MSM0274 | MSM0275 |
| MSM0276 | MSM0277 | MSM0278 | MSM0279 | MSM0280 |
| MSM0281 | MSM0282 | MSM0283 | MSM0284 | MSM0285 |
| MSM0286 | MSM0287 | MSM0288 | MSM0289 | MSM0290 |
| MSM0291 | MSM0292 | MSM0293 | MSM0294 | MSM0295 |
| MSM0296 | MSM0297 | MSM0298 | MSM0299 | MSM0300 |
| MSM0301 | MSM0302 | MSM0303 | MSM0304 | MSM0305 |
| MSM0306 | MSM0307 | MSM0308 | MSM0309 | MSM0310 |
| MSM0311 | MSM0312 | MSM0313 | MSM0314 | MSM0315 |
| MSM0316 | MSM0317 | MSM0318 | MSM0319 | MSM0320 |
| MSM0321 | MSM0322 | MSM0323 | MSM0324 | MSM0325 |
| MSM0326 | MSM0327 | MSM0328 | MSM0329 | MSM0330 |
| MSM0331 | MSM0332 | MSM0333 | MSM0334 | MSM0335 |
| MSM0336 | MSM0337 | MSM0338 | MSM0339 | MSM0340 |
| MSM0341 | MSM0342 | MSM0343 | MSM0344 | MSM0345 |
| MSM0346 | MSM0347 | MSM0348 | MSM0349 | MSM0350 |
| MSM0351 | MSM0352 | MSM0353 | MSM0354 | MSM0355 |
| MSM0356 | MSM0357 | MSM0358 | MSM0359 | MSM0360 |
| MSM0361 | MSM0362 | MSM0363 | MSM0364 | MSM0365 |
| MSM0366 | MSM0367 | MSM0368 | MSM0369 | MSM0370 |
| MSM0371 | MSM0372 | MSM0373 | MSM0374 | MSM0375 |
| MSM0376 | MSM0377 | MSM0378 | MSM0379 | MSM0380 |
| MSM0381 | MSM0382 | MSM0383 | MSM0384 | MSM0385 |
| MSM0386 | MSM0387 | MSM0388 | MSM0389 | MSM0390 |
| MSM0391 | MSM0392 | MSM0393 | MSM0394 | MSM0395 |
| MSM0396 | MSM0397 | MSM0398 | MSM0399 | MSM0400 |
| MSM0401 | MSM0402 | MSM0403 | MSM0404 | MSM0405 |
| MSM0406 | MSM0407 | MSM0408 | MSM0409 | MSM0410 |
| MSM0411 | MSM0412 | MSM0413 | MSM0414 | MSM0415 |
| MSM0416 | MSM0417 | MSM0418 | MSM0419 | MSM0420 |
| MSM0421 | MSM0422 | MSM0423 | MSM0424 | MSM0425 |
| MSM0426 | MSM0427 | MSM0428 | MSM0429 | MSM0430 |
| MSM0431 | MSM0432 | MSM0433 | MSM0434 | MSM0435 |
| MSM0436 | MSM0437 | MSM0438 | MSM0439 | MSM0440 |
| MSM0441 | MSM0442 | MSM0443 | MSM0444 | MSM0445 |
| MSM0446 | MSM0447 | MSM0448 | MSM0449 | MSM0450 |
| MSM0451 | MSM0452 | MSM0453 | MSM0454 | MSM0455 |
| MSM0456 | MSM0457 | MSM0458 | MSM0459 | MSM0460 |
| MSM0461 | MSM0462 | MSM0463 | MSM0464 | MSM0465 |
| MSM0466 | MSM0467 | MSM0468 | MSM0469 | MSM0470 |
| MSM0471 | MSM0472 | MSM0473 | MSM0474 | MSM0475 |
| MSM0476 | MSM0477 | MSM0478 | MSM0479 | MSM0480 |
| MSM0481 | MSM0482 | MSM0483 | MSM0484 | MSM0485 |
| MSM0486 | MSM0487 | MSM0488 | MSM0489 | MSM0490 |
| MSM0491 | MSM0492 | MSM0493 | MSM0494 | MSM0495 |
| MSM0496 | MSM0497 | MSM0498 | MSM0499 | MSM0500 |
| MSM0501 | MSM0502 | MSM0503 | MSM0504 | MSM0505 |
| MSM0506 | MSM0507 | MSM0508 | MSM0509 | MSM0510 |
| MSM0511 | MSM0512 | MSM0513 | MSM0514 | MSM0515 |
| MSM0516 | MSM0517 | MSM0518 | MSM0519 | MSM0520 |
| MSM0521 | MSM0522 | MSM0523 | MSM0524 | MSM0525 |
| MSM0526 | MSM0527 | MSM0528 | MSM0529 | MSM0530 |
| MSM0531 | MSM0532 | MSM0533 | MSM0534 | MSM0535 |
| MSM0536 | MSM0537 | MSM0538 | MSM0539 | MSM0540 |
| MSM0541 | MSM0542 | MSM0543 | MSM0544 | MSM0545 |
| MSM0546 | MSM0547 | MSM0548 | MSM0549 | MSM0550 |
| MSM0551 | MSM0552 | MSM0553 | MSM0554 | MSM0555 |
| MSM0556 | MSM0557 | MSM0558 | MSM0559 | MSM0560 |
| MSM0561 | MSM0562 | MSM0563 | MSM0564 | MSM0565 |
| MSM0566 | MSM0567 | MSM0568 | MSM0569 | MSM0570 |
| MSM0571 | MSM0572 | MSM0573 | MSM0574 | MSM0575 |
| MSM0576 | MSM0577 | MSM0578 | MSM0579 | MSM0580 |
| MSM0581 | MSM0582 | MSM0583 | MSM0584 | MSM0585 |
| MSM0586 | MSM0587 | MSM0588 | MSM0589 | MSM0590 |
| MSM0591 | MSM0592 | MSM0593 | MSM0594 | MSM0595 |
| MSM0596 | MSM0597 | MSM0598 | MSM0599 | MSM0600 |
| MSM0601 | MSM0602 | MSM0603 | MSM0604 | MSM0605 |
| MSM0606 | MSM0607 | MSM0608 | MSM0609 | MSM0610 |
| MSM0611 | MSM0612 | MSM0613 | MSM0614 | MSM0615 |
| MSM0616 | MSM0617 | MSM0618 | MSM0619 | MSM0620 |
| MSM0621 | MSM0622 | MSM0623 | MSM0624 | MSM0625 |
| MSM0626 | MSM0627 | MSM0628 | MSM0629 | MSM0630 |
| MSM0631 | MSM0632 | MSM0633 | MSM0634 | MSM0635 |
| MSM0636 | MSM0637 | MSM0638 | MSM0639 | MSM0640 |
| MSM0641 | MSM0642 | MSM0643 | MSM0644 | MSM0645 |
| MSM0646 | MSM0647 | MSM0648 | MSM0649 | MSM0650 |
| MSM0651 | MSM0652 | MSM0653 | MSM0654 | MSM0655 |
| MSM0656 | MSM0657 | MSM0658 | MSM0659 | MSM0660 |
| MSM0661 | MSM0662 | MSM0663 | MSM0664 | MSM0665 |
| MSM0666 | MSM0667 | MSM0668 | MSM0669 | MSM0670 |
| MSM0671 | MSM0672 | MSM0673 | MSM0674 | MSM0675 |
| MSM0676 | MSM0677 | MSM0678 | MSM0679 | MSM0680 |
| MSM0681 | MSM0682 | MSM0683 | MSM0684 | MSM0685 |
| MSM0686 | MSM0687 | MSM0688 | MSM0689 | MSM0690 |
| MSM0691 | MSM0692 | MSM0693 | MSM0694 | MSM0695 |
| MSM0696 | MSM0697 | MSM0698 | MSM0699 | MSM0700 |
| MSM0701 | MSM0702 | MSM0703 | MSM0704 | MSM0705 |
| MSM0706 | MSM0707 | MSM0708 | MSM0709 | MSM0710 |
| MSM0711 | MSM0712 | MSM0713 | MSM0714 | MSM0715 |
| MSM0716 | MSM0717 | MSM0718 | MSM0719 | MSM0720 |
| MSM0721 | MSM0722 | MSM0723 | MSM0724 | MSM0725 |
| MSM0726 | MSM0727 | MSM0728 | MSM0729 | MSM0730 |
| MSM0731 | MSM0732 | MSM0733 | MSM0734 | MSM0735 |
| MSM0736 | MSM0737 | MSM0738 | MSM0739 | MSM0740 |
| MSM0741 | MSM0742 | MSM0743 | MSM0744 | MSM0745 |
| MSM0746 | MSM0747 | MSM0748 | MSM0749 | MSM0750 |
| MSM0751 | MSM0752 | MSM0753 | MSM0754 | MSM0755 |
| MSM0756 | MSM0757 | MSM0758 | MSM0759 | MSM0760 |
| MSM0761 | MSM0762 | MSM0763 | MSM0764 | MSM0765 |
| MSM0766 | MSM0767 | MSM0768 | MSM0769 | MSM0770 |
| MSM0771 | MSM0772 | MSM0773 | MSM0774 | MSM0775 |
| MSM0776 | MSM0777 | MSM0778 | MSM0779 | MSM0780 |
| MSM0781 | MSM0782 | MSM0783 | MSM0784 | MSM0785 |
| MSM0786 | MSM0787 | MSM0788 | MSM0789 | MSM0790 |
| MSM0791 | MSM0792 | MSM0793 | MSM0794 | MSM0795 |
| MSM0796 | MSM0797 | MSM0798 | MSM0799 | MSM0800 |
| MSM0801 | MSM0802 | MSM0803 | MSM0804 | MSM0805 |
| MSM0806 | MSM0807 | MSM0808 | MSM0809 | MSM0810 |
| MSM0811 | MSM0812 | MSM0813 | MSM0814 | MSM0815 |
| MSM0816 | MSM0817 | MSM0818 | MSM0819 | MSM0820 |
| MSM0821 | MSM0822 | MSM0823 | MSM0824 | MSM0825 |
| MSM0826 | MSM0827 | MSM0828 | MSM0829 | MSM0830 |
| MSM0831 | MSM0832 | MSM0833 | MSM0834 | MSM0835 |
| MSM0836 | MSM0837 | MSM0838 | MSM0839 | MSM0840 |
| MSM0841 | MSM0842 | MSM0843 | MSM0844 | MSM0845 |
| MSM0846 | MSM0847 | MSM0848 | MSM0849 | MSM0850 |
| MSM0851 | MSM0852 | MSM0853 | MSM0854 | MSM0855 |
| MSM0856 | MSM0857 | MSM0858 | MSM0859 | MSM0860 |
| MSM0861 | MSM0862 | MSM0863 | MSM0864 | MSM0865 |
| MSM0866 | MSM0867 | MSM0868 | MSM0869 | MSM0870 |
| MSM0871 | MSM0872 | MSM0873 | MSM0874 | MSM0875 |
| MSM0876 | MSM0877 | MSM0878 | MSM0879 | MSM0880 |
| MSM0881 | MSM0882 | MSM0883 | MSM0884 | MSM0885 |
| MSM0886 | MSM0887 | MSM0888 | MSM0889 | MSM0890 |
| MSM0891 | MSM0892 | MSM0893 | MSM0894 | MSM0895 |
| MSM0896 | MSM0897 | MSM0898 | MSM0899 | MSM0900 |
| MSM0901 | MSM0902 | MSM0903 | MSM0904 | MSM0905 |
| MSM0906 | MSM0907 | MSM0908 | MSM0909 | MSM0910 |
| MSM0911 | MSM0912 | MSM0913 | MSM0914 | MSM0915 |
| MSM0916 | MSM0917 | MSM0918 | MSM0919 | MSM0920 |
| MSM0921 | MSM0922 | MSM0923 | MSM0924 | MSM0925 |
| MSM0926 | MSM0927 | MSM0928 | MSM0929 | MSM0930 |
| MSM0931 | MSM0932 | MSM0933 | MSM0934 | MSM0935 |
| MSM0936 | MSM0937 | MSM0938 | MSM0939 | MSM0940 |
| MSM0941 | MSM0942 | MSM0943 | MSM0944 | MSM0945 |
| MSM0946 | MSM0947 | MSM0948 | MSM0949 | MSM0950 |
| MSM0951 | MSM0952 | MSM0953 | MSM0954 | MSM0955 |
| MSM0956 | MSM0957 | MSM0958 | MSM0959 | MSM0960 |
| MSM0961 | MSM0962 | MSM0963 | MSM0964 | MSM0965 |
| MSM0966 | MSM0967 | MSM0968 | MSM0969 | MSM0970 |
| MSM0971 | MSM0972 | MSM0973 | MSM0974 | MSM0975 |
| MSM0976 | MSM0977 | MSM0978 | MSM0979 | MSM0980 |
| MSM0981 | MSM0982 | MSM0983 | MSM0984 | MSM0985 |
| MSM0986 | MSM0987 | MSM0988 | MSM0989 | MSM0990 |
| MSM0991 | MSM0992 | MSM0993 | MSM0994 | MSM0995 |
| MSM0996 | MSM0997 | MSM0998 | MSM0999 | MSM1000 |
| MSM1001 | MSM1002 | MSM1003 | MSM1004 | MSM1005 |
| MSM1006 | MSM1007 | MSM1008 | MSM1009 | MSM1010 |
| MSM1011 | MSM1012 | MSM1013 | MSM1014 | MSM1015 |
| MSM1016 | MSM1017 | MSM1018 | MSM1019 | MSM1020 |
| MSM1021 | MSM1022 | MSM1023 | MSM1024 | MSM1025 |
| MSM1026 | MSM1027 | MSM1028 | MSM1029 | MSM1030 |
| MSM1031 | MSM1032 | MSM1033 | MSM1034 | MSM1035 |
| MSM1036 | MSM1037 | MSM1038 | MSM1039 | MSM1040 |
| MSM1041 | MSM1042 | MSM1043 | MSM1044 | MSM1045 |
| MSM1046 | MSM1047 | MSM1048 | MSM1049 | MSM1050 |
| MSM1051 | MSM1052 | MSM1053 | MSM1054 | MSM1055 |
| MSM1056 | MSM1057 | MSM1058 | MSM1059 | MSM1060 |
| MSM1061 | MSM1062 | MSM1063 | MSM1064 | MSM1065 |
| MSM1066 | MSM1067 | MSM1068 | MSM1069 | MSM1070 |
| MSM1071 | MSM1072 | MSM1073 | MSM1074 | MSM1075 |
| MSM1076 | MSM1077 | MSM1078 | MSM1079 | MSM1080 |
| MSM1081 | MSM1082 | MSM1083 | MSM1084 | MSM1085 |
| MSM1086 | MSM1087 | MSM1088 | MSM1089 | MSM1090 |
| MSM1091 | MSM1092 | MSM1093 | MSM1094 | MSM1095 |
| MSM1096 | MSM1097 | MSM1098 | MSM1099 | MSM1100 |
| MSM1101 | MSM1102 | MSM1103 | MSM1104 | MSM1105 |
| MSM1106 | MSM1107 | MSM1108 | MSM1109 | MSM1110 |
| MSM1111 | MSM1112 | MSM1113 | MSM1114 | MSM1115 |
| MSM1116 | MSM1117 | MSM1118 | MSM1119 | MSM1120 |
| MSM1121 | MSM1122 | MSM1123 | MSM1124 | MSM1125 |
| MSM1126 | MSM1127 | MSM1128 | MSM1129 | MSM1130 |
| MSM1131 | MSM1132 | MSM1133 | MSM1134 | MSM1135 |
| MSM1136 | MSM1137 | MSM1138 | MSM1139 | MSM1140 |
| MSM1141 | MSM1142 | MSM1143 | MSM1144 | MSM1145 |
| MSM1146 | MSM1147 | MSM1148 | MSM1149 | MSM1150 |
| MSM1151 | MSM1152 | MSM1153 | MSM1154 | MSM1155 |
| MSM1156 | MSM1157 | MSM1158 | MSM1159 | MSM1160 |
| MSM1161 | MSM1162 | MSM1163 | MSM1164 | MSM1165 |
| MSM1166 | MSM1167 | MSM1168 | MSM1169 | MSM1170 |
| MSM1171 | MSM1172 | MSM1173 | MSM1174 | MSM1175 |
| MSM1176 | MSM1177 | MSM1178 | MSM1179 | MSM1180 |
| MSM1181 | MSM1182 | MSM1183 | MSM1184 | MSM1185 |
| MSM1186 | MSM1187 | MSM1188 | MSM1189 | MSM1190 |
| MSM1191 | MSM1192 | MSM1193 | MSM1194 | MSM1195 |
| MSM1196 | MSM1197 | MSM1198 | MSM1199 | MSM1200 |
| MSM1201 | MSM1202 | MSM1203 | MSM1204 | MSM1205 |
| MSM1206 | MSM1207 | MSM1208 | MSM1209 | MSM1210 |
| MSM1211 | MSM1212 | MSM1213 | MSM1214 | MSM1215 |
| MSM1216 | MSM1217 | MSM1218 | MSM1219 | MSM1220 |
| MSM1221 | MSM1222 | MSM1223 | MSM1224 | MSM1225 |
| MSM1226 | MSM1227 | MSM1228 | MSM1229 | MSM1230 |
| MSM1231 | MSM1232 | MSM1233 | MSM1234 | MSM1235 |
| MSM1236 | MSM1237 | MSM1238 | MSM1239 | MSM1240 |
| MSM1241 | MSM1242 | MSM1243 | MSM1244 | MSM1245 |
| MSM1246 | MSM1247 | MSM1248 | MSM1249 | MSM1250 |
| MSM1251 | MSM1252 | MSM1253 | MSM1254 | MSM1255 |
| MSM1256 | MSM1257 | MSM1258 | MSM1259 | MSM1260 |
| MSM1261 | MSM1262 | MSM1263 | MSM1264 | MSM1265 |
| MSM1266 | MSM1267 | MSM1268 | MSM1269 | MSM1270 |
| MSM1271 | MSM1272 | MSM1273 | MSM1274 | MSM1275 |
| MSM1276 | MSM1277 | MSM1278 | MSM1279 | MSM1280 |
| MSM1281 | MSM1282 | MSM1283 | MSM1284 | MSM1285 |
| MSM1286 | MSM1287 | MSM1288 | MSM1289 | MSM1290 |
| MSM1291 | MSM1292 | MSM1293 | MSM1294 | MSM1295 |
| MSM1296 | MSM1297 | MSM1298 | MSM1299 | MSM1300 |
| MSM1301 | MSM1302 | MSM1303 | MSM1304 | MSM1305 |
| MSM1306 | MSM1307 | MSM1308 | MSM1309 | MSM1310 |
| MSM1311 | MSM1312 | MSM1313 | MSM1314 | MSM1315 |
| MSM1316 | MSM1317 | MSM1318 | MSM1319 | MSM1320 |
| MSM1321 | MSM1322 | MSM1323 | MSM1324 | MSM1325 |
| MSM1326 | MSM1327 | MSM1328 | MSM1329 | MSM1330 |
| MSM1331 | MSM1332 | MSM1333 | MSM1334 | MSM1335 |
| MSM1336 | MSM1337 | MSM1338 | MSM1339 | MSM1340 |
| MSM1341 | MSM1342 | MSM1343 | MSM1344 | MSM1345 |
| MSM1346 | MSM1347 | MSM1348 | MSM1349 | MSM1350 |
| MSM1351 | MSM1352 | MSM1353 | MSM1354 | MSM1355 |
| MSM1356 | MSM1357 | MSM1358 | MSM1359 | MSM1360 |
| MSM1361 | MSM1362 | MSM1363 | MSM1364 | MSM1365 |
| MSM1366 | MSM1367 | MSM1368 | MSM1369 | MSM1370 |
| MSM1371 | MSM1372 | MSM1373 | MSM1374 | MSM1375 |
| MSM1376 | MSM1377 | MSM1378 | MSM1379 | MSM1380 |
| MSM1381 | MSM1382 | MSM1383 | MSM1384 | MSM1385 |
| MSM1386 | MSM1387 | MSM1388 | MSM1389 | MSM1390 |
| MSM1391 | MSM1392 | MSM1393 | MSM1394 | MSM1395 |
| MSM1396 | MSM1397 | MSM1398 | MSM1399 | MSM1400 |
| MSM1401 | MSM1402 | MSM1403 | MSM1404 | MSM1405 |
| MSM1406 | MSM1407 | MSM1408 | MSM1409 | MSM1410 |
| MSM1411 | MSM1412 | MSM1413 | MSM1414 | MSM1415 |
| MSM1416 | MSM1417 | MSM1418 | MSM1419 | MSM1420 |
| MSM1421 | MSM1422 | MSM1423 | MSM1424 | MSM1425 |
| MSM1426 | MSM1427 | MSM1428 | MSM1429 | MSM1430 |
| MSM1431 | MSM1432 | MSM1433 | MSM1434 | MSM1435 |
| MSM1436 | MSM1437 | MSM1438 | MSM1439 | MSM1440 |
| MSM1441 | MSM1442 | MSM1443 | MSM1444 | MSM1445 |
| MSM1446 | MSM1447 | MSM1448 | MSM1449 | MSM1450 |
| MSM1451 | MSM1452 | MSM1453 | MSM1454 | MSM1455 |
| MSM1456 | MSM1457 | MSM1458 | MSM1459 | MSM1460 |
| MSM1461 | MSM1462 | MSM1463 | MSM1464 | MSM1465 |
| MSM1466 | MSM1467 | MSM1468 | MSM1469 | MSM1470 |
| MSM1471 | MSM1472 | MSM1473 | MSM1474 | MSM1475 |
| MSM1476 | MSM1477 | MSM1478 | MSM1479 | MSM1480 |
| MSM1481 | MSM1482 | MSM1483 | MSM1484 | MSM1485 |
| MSM1486 | MSM1487 | MSM1488 | MSM1489 | MSM1490 |
| MSM1491 | MSM1492 | MSM1493 | MSM1494 | MSM1495 |
| MSM1496 | MSM1497 | MSM1498 | MSM1499 | MSM1500 |
| MSM1501 | MSM1502 | MSM1503 | MSM1504 | MSM1505 |
| MSM1506 | MSM1507 | MSM1508 | MSM1509 | MSM1510 |
| MSM1511 | MSM1512 | MSM1513 | MSM1514 | MSM1515 |
| MSM1516 | MSM1517 | MSM1518 | MSM1519 | MSM1520 |
| MSM1521 | MSM1522 | MSM1523 | MSM1524 | MSM1525 |
| MSM1526 | MSM1527 | MSM1528 | MSM1529 | MSM1530 |
| MSM1531 | MSM1532 | MSM1533 | MSM1534 | MSM1535 |
| MSM1536 | MSM1537 | MSM1538 | MSM1539 | MSM1540 |
| MSM1541 | MSM1542 | MSM1543 | MSM1544 | MSM1545 |
| MSM1546 | MSM1547 | MSM1548 | MSM1549 | MSM1550 |
| MSM1551 | MSM1552 | MSM1553 | MSM1554 | MSM1555 |
| MSM1556 | MSM1557 | MSM1558 | MSM1559 | MSM1560 |
| MSM1561 | MSM1562 | MSM1563 | MSM1564 | MSM1565 |
| MSM1566 | MSM1567 | MSM1568 | MSM1569 | MSM1570 |
| MSM1571 | MSM1572 | MSM1573 | MSM1574 | MSM1575 |
| MSM1576 | MSM1577 | MSM1578 | MSM1579 | MSM1580 |
| MSM1581 | MSM1582 | MSM1583 | MSM1584 | MSM1585 |
| MSM1586 | MSM1587 | MSM1588 | MSM1589 | MSM1590 |
| MSM1591 | MSM1592 | MSM1593 | MSM1594 | MSM1595 |
| MSM1596 | MSM1597 | MSM1598 | MSM1599 | MSM1600 |
| MSM1601 | MSM1602 | MSM1603 | MSM1604 | MSM1605 |
| MSM1606 | MSM1607 | MSM1608 | MSM1609 | MSM1610 |
| MSM1611 | MSM1612 | MSM1613 | MSM1614 | MSM1615 |
| MSM1616 | MSM1617 | MSM1618 | MSM1619 | MSM1620 |
| MSM1621 | MSM1622 | MSM1623 | MSM1624 | MSM1625 |
| MSM1626 | MSM1627 | MSM1628 | MSM1629 | MSM1630 |
| MSM1631 | MSM1632 | MSM1633 | MSM1634 | MSM1635 |
| MSM1636 | MSM1637 | MSM1638 | MSM1639 | MSM1640 |
| MSM1641 | MSM1642 | MSM1643 | MSM1644 | MSM1645 |
| MSM1646 | MSM1647 | MSM1648 | MSM1649 | MSM1650 |
| MSM1651 | MSM1652 | MSM1653 | MSM1654 | MSM1655 |
| MSM1656 | MSM1657 | MSM1658 | MSM1659 | MSM1660 |
| MSM1661 | MSM1662 | MSM1663 | MSM1664 | MSM1665 |
| MSM1666 | MSM1667 | MSM1668 | MSM1669 | MSM1670 |
| MSM1671 | MSM1672 | MSM1673 | MSM1674 | MSM1675 |
| MSM1676 | MSM1677 | MSM1678 | MSM1679 | MSM1680 |
| MSM1681 | MSM1682 | MSM1683 | MSM1684 | MSM1685 |
| MSM1686 | MSM1687 | MSM1688 | MSM1689 | MSM1690 |
| MSM1691 | MSM1692 | MSM1693 | MSM1694 | MSM1695 |
| MSM1696 | MSM1697 | MSM1698 | MSM1699 | MSM1700 |
| MSM1701 | MSM1702 | MSM1703 | MSM1704 | MSM1705 |
| MSM1706 | MSM1707 | MSM1708 | MSM1709 | MSM1710 |
| MSM1711 | MSM1712 | MSM1713 | MSM1714 | MSM1715 |
| MSM1716 | MSM1717 | MSM1718 | MSM1719 | MSM1720 |
| MSM1721 | MSM1722 | MSM1723 | MSM1724 | MSM1725 |
| MSM1726 | MSM1727 | MSM1728 | MSM1729 | MSM1730 |
| MSM1731 | MSM1732 | MSM1733 | MSM1734 | MSM1735 |
| MSM1736 | MSM1737 | MSM1738 | MSM1739 | MSM1740 |
| MSM1741 | MSM1742 | MSM1743 | MSM1744 | MSM1745 |
| MSM1746 | MSM1747 | MSM1748 | MSM1749 | MSM1750 |
| MSM1751 | MSM1752 | MSM1753 | MSM1754 | MSM1755 |
| MSM1756 | MSM1757 | MSM1758 | MSM1759 | MSM1760 |
| MSM1761 | MSM1762 | MSM1763 | MSM1764 | MSM1765 |
| MSM1766 | MSM1767 | MSM1768 | MSM1769 | MSM1770 |
| MSM1771 | MSM1772 | MSM1773 | MSM1774 | MSM1775 |
| MSM1776 | MSM1777 | MSM1778 | MSM1779 | MSM1780 |
| MSM1781 | MSM1782 | MSM1783 | MSM1784 | MSM1785 |
| MSM1786 | MSM1787 | MSM1788 | MSM1789 | MSM1790 |
| MSM1791 | MSM1792 | MSM1793 | MSM1794 | MSM1795 |

TABLE B
SEQ ID NOs for nucleic acid sequences of ALPs and
putative ALPs from M. smithii strain PS

| Locus tag | Annotation | SEQ ID NO | GeneID |
|---|---|---|---|
| MSM0031 | ALP | 1 | 5216283 |
| MSM0051 | ALP | 3 | 5215780 |
| MSM0052 | ALP | 5 | 5215781 |
| MSM0057 | ALP | 7 | 5215760 |
| MSM0092 | putative ALP | 9 | 5216811 |
| MSM0159 | ALP | 11 | 5216808 |
| MSM0173 | ALP | 13 | 5216543 |
| MSM0221 | ALP | 15 | 5216462 |
| MSM0266 | ALP | 17 | 5216710 |
| MSM0281 | putative ALP | 19 | 5216489 |
| MSM0282 | ALP | 21 | 5216741 |
| MSM0337 | putative ALP | 23 | 5216748 |
| MSM0411 | ALP | 25 | 5216551 |
| MSM0412 | ALP | 27 | 5216552 |
| MSM0461 | ALP | 29 | 5216168 |
| MSM0580 | ALP | 31 | 5217434 |
| MSM0616 | ALP | 33 | 5217327 |
| MSM0884 | ALP | 35 | 5215891 |
| MSM0885 | ALP | 37 | 5216018 |
| MSM0957 | ALP | 39 | 5216076 |
| MSM0995 | ALP | 41 | 5217000 |
| MSM0996 | ALP | 43 | 5217001 |
| MSM1111 | ALP | 45 | 5216938 |
| MSM1112 | ALP | 47 | 5216939 |
| MSM1113 | ALP | 49 | 5216940 |
| MSM1114 | ALP | 51 | 5216941 |
| MSM1116 | ALP | 53 | 5216944 |
| MSM1168 | putative ALP | 55 | 5217402 |
| MSM1188 | ALP | 57 | 5216254 |
| MSM1282 | putative ALP | 59 | 5217426 |
| MSM1305 | ALP | 61 | 5215879 |
| MSM1306 | ALP | 63 | 5215880 |
| MSM1397 | ALP | 65 | 5216612 |
| MSM1398 | ALP | 67 | 5216613 |
| MSM1399 | ALP | 69 | 5216614 |
| MSM1485 | putative ALP | 71 | 5216177 |
| MSM1533 | ALP | 73 | 5216447 |
| MSM1534 | ALP | 75 | 5216448 |
| MSM1554 | putative ALP | 77 | 5216474 |
| MSM1567 | ALP | 79 | 5216067 |
| MSM1585 | ALP | 81 | 5217144 |
| MSM1586 | ALP | 83 | 5217145 |
| MSM1587 | ALP | 85 | 5217146 |
| MSM1590 | ALP | 87 | 5217149 |
| MSM1709 | ALP | 89 | 5217342 |
| MSM1716 | ALP | 91 | 5217453 |
| MSM1735 | ALP | 93 | 5215918 |
| MSM1738 | putative ALP | 95 | 5215921 |

TABLE C
SEQ ID NOs for amino sequences of ALPs and
putative ALPs from M. smithii strain PS

| Locus tag | Annotation | SEQ ID NO | Protein ID |
|---|---|---|---|
| MSM0031 | ALP | 2 | YP_001272604.1 |
| MSM0051 | ALP | 4 | YP_001272624.1 |
| MSM0052 | ALP | 6 | YP_001272625.1 |
| MSM0057 | ALP | 8 | YP_001272665.1 |
| MSM0092 | putative ALP | 10 | YP_0012726321.1 |
| MSM0159 | ALP | 12 | YP_001272732.1 |
| MSM0173 | ALP | 14 | YP_001272746.1 |
| MSM0221 | ALP | 16 | YP_001272794.1 |
| MSM0266 | ALP | 18 | YP_001272839.1 |
| MSM0281 | putative ALP | 20 | YP_001272854.1 |
| MSM0282 | ALP | 22 | YP_001272855.1 |
| MSM0337 | putative ALP | 24 | YP_001272910.1 |
| MSM0411 | ALP | 26 | YP_001272984.1 |
| MSM0412 | ALP | 28 | YP_001272985.1 |
| MSM0461 | ALP | 30 | YP_001273034.1 |
| MSM0580 | ALP | 32 | YP_001273153.1 |
| MSM0616 | ALP | 34 | YP_001273189.1 |
| MSM0884 | ALP | 36 | YP_001273457.1 |
| MSM0885 | ALP | 38 | YP_001273458.1 |
| MSM0957 | ALP | 40 | YP_001273530.1 |
| MSM0995 | ALP | 42 | YP_001273568.1 |
| MSM0996 | ALP | 44 | YP_001273569.1 |
| MSM1111 | ALP | 46 | YP_001273684.1 |
| MSM1112 | ALP | 48 | YP_001273685.1 |
| MSM1113 | ALP | 50 | YP_001273686.1 |
| MSM1114 | ALP | 52 | YP_001273687.1 |
| MSM1116 | ALP | 54 | YP_001273689.1 |
| MSM1168 | putative ALP | 56 | YP_001273741.1 |
| MSM1188 | ALP | 58 | YP_001273761.1 |
| MSM1282 | putative ALP | 60 | YP_001273855.1 |
| MSM1305 | ALP | 62 | YP_001273878.1 |
| MSM1306 | ALP | 64 | YP_001273879.1 |
| MSM1397 | ALP | 66 | YP_001273970.1 |
| MSM1398 | ALP | 68 | YP_001273971.1 |
| MSM1399 | ALP | 70 | YP_001273972.1 |
| MSM1485 | putative ALP | 72 | YP_001274058.1 |
| MSM1533 | ALP | 74 | YP_001274106.1 |
| MSM1534 | ALP | 76 | YP_001274107.1 |
| MSM1554 | putative ALP | 78 | YP_001274127.1 |
| MSM1567 | ALP | 80 | YP_001274140.1 |
| MSM1585 | ALP | 82 | YP_001274158.1 |
| MSM1586 | ALP | 84 | YP_001274159.1 |
| MSM1587 | ALP | 86 | YP_001274160.1 |
| MSM1590 | ALP | 88 | YP_001274163.1 |
| MSM1709 | ALP | 90 | YP_001274282.1 |
| MSM1716 | ALP | 92 | YP_001274289.1 |
| MSM1735 | ALP | 94 | YP_001274308.1 |
| MSM1738 | putative ALP | 96 | YP_001274311.1 |

TABLE D
SEQ ID NOs for nucleic acid sequences of ALPs and
putative ALPs from other M. smithii strains

| | | SEQ |
|---|---|---|
| | | ID |
| Strain | ALP Gene Number | NO |
| METSMIALI | METSMIALI_0078 | 97 |
| METSMIALI | METSMIALI_0079 | 98 |
| METSMIALI | METSMIALI_0100 | 99 |
| METSMIALI | METSMIALI_0150 | 100 |
| METSMIALI | METSMIALI_0152 | 101 |
| METSMIALI | METSMIALI_0198 | 102 |
| METSMIALI | METSMIALI_0269 | 103 |
| METSMIALI | METSMIALI_0270 | 104 |
| METSMIALI | METSMIALI_0307 | 105 |
| METSMIALI | METSMIALI_0308 | 106 |
| METSMIALI | METSMIALI_0328 | 107 |
| METSMIALI | METSMIALI_0370 | 108 |
| METSMIALI | METSMIALI_0373 | 109 |
| METSMIALI | METSMIALI_0480 | 110 |
| METSMIALI | METSMIALI_0510 | 111 |
| METSMIALI | METSMIALI_0551 | 112 |
| METSMIALI | METSMIALI_0670 | 113 |
| METSMIALI | METSMIALI_0776 | 114 |
| METSMIALI | METSMIALI_0810 | 115 |
| METSMIALI | METSMIALI_0845 | 116 |
| METSMIALI | METSMIALI_0884 | 117 |
| METSMIALI | METSMIALI_0998 | 118 |
| METSMIALI | METSMIALI_0999 | 119 |
| METSMIALI | METSMIALI_1053 | 120 |
| METSMIALI | METSMIALI_1073 | 121 |
| METSMIALI | METSMIALI_1074 | 122 |
| METSMIALI | METSMIALI_1175 | 123 |
| METSMIALI | METSMIALI_1199 | 124 |
| METSMIALI | METSMIALI_1452 | 125 |
| METSMIALI | METSMIALI_1616 | 126 |
| METSMIALI | METSMIALI_1617 | 127 |
| METSMIF1 | METSMIF1_0060 | 128 |
| METSMIF1 | METSMIF1_0061 | 129 |
| METSMIF1 | METSMIF1_0226 | 130 |
| METSMIF1 | METSMIF1_0475 | 131 |
| METSMIF1 | METSMIF1_0593 | 132 |
| METSMIF1 | METSMIF1_0614 | 133 |
| METSMIF1 | METSMIF1_0615 | 134 |
| METSMIF1 | METSMIF1_0669 | 135 |
| METSMIF1 | METSMIF1_0670 | 136 |
| METSMIF1 | METSMIF1_0671 | 137 |
| METSMIF1 | METSMIF1_0672 | 138 |
| METSMIF1 | METSMIF1_0673 | 139 |
| METSMIF1 | METSMIF1_0788 | 140 |
| METSMIF1 | METSMIF1_0827 | 141 |
| METSMIF1 | METSMIF1_0861 | 142 |
| METSMIF1 | METSMIF1_0893 | 143 |
| METSMIF1 | METSMIF1_0894 | 144 |
| METSMIF1 | METSMIF1_0991 | 145 |
| METSMIF1 | METSMIF1_1105 | 146 |
| METSMIF1 | METSMIF1_1176 | 147 |
| METSMIF1 | METSMIF1_1264 | 148 |
| METSMIF1 | METSMIF1_1284 | 149 |
| METSMIF1 | METSMIF1_1287 | 150 |
| METSMIF1 | METSMIF1_1359 | 151 |
| METSMIF1 | METSMIF1_1379 | 152 |
| METSMIF1 | METSMIF1_1380 | 153 |
| METSMIF1 | METSMIF1_1381 | 154 |
| METSMIF1 | METSMIF1_1489 | 155 |
| METSMIF1 | METSMIF1_1536 | 156 |
| METSMIF1 | METSMIF1_1538 | 157 |
| METSMIF1 | METSMIF1_1583 | 158 |
| METSMIF1 | METSMIF1_1598 | 159 |
| METSMIF1 | METSMIF1_1599 | 160 |
| METSMIF1 | METSMIF1_1672 | 161 |
| METSMITS145A | METSMITS145A_0074 | 162 |
| METSMITS145A | METSMITS145A_0093 | 163 |
| METSMITS145A | METSMITS145A_0096 | 164 |
| METSMITS145A | METSMITS145A_0133 | 165 |
| METSMITS145A | METSMITS145A_0153 | 166 |
| METSMITS145A | METSMITS145A_0154 | 167 |
| METSMITS145A | METSMITS145A_0155 | 168 |
| METSMITS145A | METSMITS145A_0199 | 169 |
| METSMITS145A | METSMITS145A_0277 | 170 |
| METSMITS145A | METSMITS145A_0323 | 171 |
| METSMITS145A | METSMITS145A_0326 | 172 |
| METSMITS145A | METSMITS145A_0336 | 173 |
| METSMITS145A | METSMITS145A_0374 | 174 |
| METSMITS145A | METSMITS145A_0393 | 175 |
| METSMITS145A | METSMITS145A_0394 | 176 |
| METSMITS145A | METSMITS145A_0395 | 177 |
| METSMITS145A | METSMITS145A_0542 | 178 |
| METSMITS145A | METSMITS145A_0543 | 179 |
| METSMITS145A | METSMITS145A_0545 | 180 |
| METSMITS145A | METSMITS145A_0704 | 181 |
| METSMITS145A | METSMITS145A_0874 | 182 |
| METSMITS145A | METSMITS145A_0875 | 183 |
| METSMITS145A | METSMITS145A_0876 | 184 |
| METSMITS145A | METSMITS145A_0967 | 185 |
| METSMITS145A | METSMITS145A_0968 | 186 |
| METSMITS145A | METSMITS145A_0997 | 187 |
| METSMITS145A | METSMITS145A_0998 | 188 |
| METSMITS145A | METSMITS145A_1005 | 189 |
| METSMITS145A | METSMITS145A_1043 | 190 |
| METSMITS145A | METSMITS145A_1083 | 191 |
| METSMITS145A | METSMITS145A_1196 | 192 |
| METSMITS145A | METSMITS145A_1253 | 193 |
| METSMITS145A | METSMITS145A_1254 | 194 |
| METSMITS145A | METSMITS145A_1277 | 195 |
| METSMITS145A | METSMITS145A_1377 | 196 |
| METSMITS145A | METSMITS145A_1399 | 197 |
| METSMITS145A | METSMITS145A_1400 | 198 |
| METSMITS145A | METSMITS145A_1401 | 199 |
| METSMITS145A | METSMITS145A_1497 | 200 |
| METSMITS145A | METSMITS145A_1498 | 201 |
| METSMITS145A | METSMITS145A_1621 | 202 |
| METSMITS145A | METSMITS145A_1661 | 203 |
| METSMITS145A | METSMITS145A_1684 | 204 |
| METSMITS145A | METSMITS145A_1696 | 205 |
| METSMITS145A | METSMITS145A_1697 | 206 |
| METSMITS145A | METSMITS145A_1716 | 207 |
| METSMITS145A | METSMITS145A_1718 | 208 |
| METSMITS145B | METSMITS145B_0009 | 209 |
| METSMITS145B | METSMITS145B_0030 | 210 |
| METSMITS145B | METSMITS145B_0031 | 211 |
| METSMITS145B | METSMITS145B_0032 | 212 |
| METSMITS145B | METSMITS145B_0033 | 213 |
| METSMITS145B | METSMITS145B_0034 | 214 |
| METSMITS145B | METSMITS145B_0079 | 215 |
| METSMITS145B | METSMITS145B_0154 | 216 |
| METSMITS145B | METSMITS145B_0202 | 217 |
| METSMITS145B | METSMITS145B_0205 | 218 |
| METSMITS145B | METSMITS145B_0256 | 219 |
| METSMITS145B | METSMITS145B_0257 | 220 |
| METSMITS145B | METSMITS145B_0274 | 221 |
| METSMITS145B | METSMITS145B_0275 | 222 |
| METSMITS145B | METSMITS145B_0428 | 223 |
| METSMITS145B | METSMITS145B_0429 | 224 |
| METSMITS145B | METSMITS145B_0431 | 225 |
| METSMITS145B | METSMITS145B_0599 | 226 |
| METSMITS145B | METSMITS145B_0782 | 227 |
| METSMITS145B | METSMITS145B_0783 | 228 |
| METSMITS145B | METSMITS145B_0784 | 229 |
| METSMITS145B | METSMITS145B_0793 | 230 |
| METSMITS145B | METSMITS145B_0800 | 231 |
| METSMITS145B | METSMITS145B_0928 | 232 |
| METSMITS145B | METSMITS145B_0929 | 233 |
| METSMITS145B | METSMITS145B_1027 | 234 |
| METSMITS145B | METSMITS145B_1028 | 235 |
| METSMITS145B | METSMITS145B_1092 | 236 |
| METSMITS145B | METSMITS145B_1093 | 237 |
| METSMITS145B | METSMITS145B_1094 | 238 |
| METSMITS145B | METSMITS145B_1095 | 239 |
| METSMITS145B | METSMITS145B_1220 | 240 |
| METSMITS145B | METSMITS145B_1227 | 241 |
| METSMITS145B | METSMITS145B_1270 | 242 |
| METSMITS145B | METSMITS145B_1314 | 243 |
| METSMITS145B | METSMITS145B_1435 | 244 |
| METSMITS145B | METSMITS145B_1495 | 245 |
| METSMITS145B | METSMITS145B_1522 | 246 |
| METSMITS145B | METSMITS145B_1631 | 247 |
| METSMITS145B | METSMITS145B_1653 | 248 |
| METSMITS145B | METSMITS145B_1665 | 249 |
| METSMITS145B | METSMITS145B_1666 | 250 |
| METSMITS145B | METSMITS145B_1681 | 251 |
| METSMITS145B | METSMITS145B_1703 | 252 |
| METSMITS145B | METSMITS145B_1705 | 253 |
| METSMITS145B | METSMITS145B_1832 | 254 |
| METSMITS145B | METSMITS145B_1852 | 255 |
| METSMITS145B | METSMITS145B_1854 | 256 |
| METSMITS146A | METSMITS146A_0023 | 257 |
| METSMITS146A | METSMITS146A_0024 | 258 |
| METSMITS146A | METSMITS146A_0025 | 259 |
| METSMITS146A | METSMITS146A_0026 | 260 |
| METSMITS146A | METSMITS146A_0069 | 261 |
| METSMITS146A | METSMITS146A_0146 | 262 |
| METSMITS146A | METSMITS146A_0193 | 263 |
| METSMITS146A | METSMITS146A_0194 | 264 |
| METSMITS146A | METSMITS146A_0196 | 265 |
| METSMITS146A | METSMITS146A_0244 | 266 |
| METSMITS146A | METSMITS146A_0245 | 267 |
| METSMITS146A | METSMITS146A_0263 | 268 |
| METSMITS146A | METSMITS146A_0335 | 269 |
| METSMITS146A | METSMITS146A_0336 | 270 |
| METSMITS146A | METSMITS146A_0338 | 271 |
| METSMITS146A | METSMITS146A_0588 | 272 |
| METSMITS146A | METSMITS146A_0756 | 273 |
| METSMITS146A | METSMITS146A_0757 | 274 |
| METSMITS146A | METSMITS146A_0758 | 275 |
| METSMITS146A | METSMITS146A_0803 | 276 |
| METSMITS146A | METSMITS146A_0928 | 277 |
| METSMITS146A | METSMITS146A_1029 | 278 |
| METSMITS146A | METSMITS146A_1030 | 279 |
| METSMITS146A | METSMITS146A_1060 | 280 |
| METSMITS146A | METSMITS146A_1061 | 281 |
| METSMITS146A | METSMITS146A_1068 | 282 |
| METSMITS146A | METSMITS146A_1105 | 283 |
| METSMITS146A | METSMITS146A_1146 | 284 |
| METSMITS146A | METSMITS146A_1147 | 285 |
| METSMITS146A | METSMITS146A_1265 | 286 |
| METSMITS146A | METSMITS146A_1321 | 287 |
| METSMITS146A | METSMITS146A_1346 | 288 |
| METSMITS146A | METSMITS146A_1471 | 289 |
| METSMITS146A | METSMITS146A_1562 | 290 |
| METSMITS146A | METSMITS146A_1563 | 291 |
| METSMITS146A | METSMITS146A_1586 | 292 |
| METSMITS146A | METSMITS146A_1600 | 293 |
| METSMITS146A | METSMITS146A_1619 | 294 |
| METSMITS146A | METSMITS146A_1620 | 295 |
| METSMITS146A | METSMITS146A_1622 | 296 |
| METSMITS146A | METSMITS146A_1623 | 297 |
| METSMITS146A | METSMITS146A_1767 | 298 |
| METSMITS146A | METSMITS146A_1769 | 299 |
| METSMITS146A | METSMITS146A_1810 | 300 |
| METSMITS146B | METSMITS146B_0012 | 301 |
| METSMITS146B | METSMITS146B_0013 | 302 |
| METSMITS146B | METSMITS146B_0034 | 303 |
| METSMITS146B | METSMITS146B_0035 | 304 |
| METSMITS146B | METSMITS146B_0036 | 305 |
| METSMITS146B | METSMITS146B_0077 | 306 |
| METSMITS146B | METSMITS146B_0158 | 307 |
| METSMITS146B | METSMITS146B_0203 | 308 |
| METSMITS146B | METSMITS146B_0205 | 309 |
| METSMITS146B | METSMITS146B_0254 | 310 |
| METSMITS146B | METSMITS146B_0271 | 311 |
| METSMITS146B | METSMITS146B_0422 | 312 |
| METSMITS146B | METSMITS146B_0424 | 313 |
| METSMITS146B | METSMITS146B_0584 | 314 |
| METSMITS146B | METSMITS146B_0759 | 315 |
| METSMITS146B | METSMITS146B_0760 | 316 |
| METSMITS146B | METSMITS146B_0761 | 317 |
| METSMITS146B | METSMITS146B_0791 | 318 |
| METSMITS146B | METSMITS146B_0919 | 319 |
| METSMITS146B | METSMITS146B_0920 | 320 |
| METSMITS146B | METSMITS146B_1017 | 321 |
| METSMITS146B | METSMITS146B_1018 | 322 |
| METSMITS146B | METSMITS146B_1049 | 323 |
| METSMITS146B | METSMITS146B_1056 | 324 |
| METSMITS146B | METSMITS146B_1096 | 325 |
| METSMITS146B | METSMITS146B_1137 | 326 |
| METSMITS146B | METSMITS146B_1253 | 327 |
| METSMITS146B | METSMITS146B_1254 | 328 |
| METSMITS146B | METSMITS146B_1313 | 329 |
| METSMITS146B | METSMITS146B_1335 | 330 |
| METSMITS146B | METSMITS146B_1431 | 331 |
| METSMITS146B | METSMITS146B_1455 | 332 |
| METSMITS146B | METSMITS146B_1574 | 333 |
| METSMITS146B | METSMITS146B_1575 | 334 |
| METSMITS146B | METSMITS146B_1601 | 335 |
| METSMITS146B | METSMITS146B_1614 | 336 |
| METSMITS146B | METSMITS146B_1633 | 337 |
| METSMITS146B | METSMITS146B_1635 | 338 |
| METSMITS146B | METSMITS146B_1636 | 339 |
| METSMITS146B | METSMITS146B_1766 | 340 |
| METSMITS146B | METSMITS146B_1785 | 341 |
| METSMITS146C | METSMITS146C_0021 | 342 |
| METSMITS146C | METSMITS146C_0043 | 343 |
| METSMITS146C | METSMITS146C_0044 | 344 |
| METSMITS146C | METSMITS146C_0046 | 345 |
| METSMITS146C | METSMITS146C_0047 | 346 |
| METSMITS146C | METSMITS146C_0048 | 347 |
| METSMITS146C | METSMITS146C_0049 | 348 |
| METSMITS146C | METSMITS146C_0050 | 349 |
| METSMITS146C | METSMITS146C_0051 | 350 |
| METSMITS146C | METSMITS146C_0052 | 351 |
| METSMITS146C | METSMITS146C_0101 | 352 |
| METSMITS146C | METSMITS146C_0168 | 353 |
| METSMITS146C | METSMITS146C_0273 | 354 |
| METSMITS146C | METSMITS146C_0274 | 355 |
| METSMITS146C | METSMITS146C_0329 | 356 |
| METSMITS146C | METSMITS146C_0330 | 357 |
| METSMITS146C | METSMITS146C_0331 | 358 |
| METSMITS146C | METSMITS146C_0333 | 359 |
| METSMITS146C | METSMITS146C_0355 | 360 |
| METSMITS146C | METSMITS146C_0356 | 361 |
| METSMITS146C | METSMITS146C_0357 | 362 |
| METSMITS146C | METSMITS146C_0358 | 363 |
| METSMITS146C | METSMITS146C_0359 | 364 |
| METSMITS146C | METSMITS146C_0360 | 365 |
| METSMITS146C | METSMITS146C_0361 | 366 |
| METSMITS146C | METSMITS146C_0387 | 367 |
| METSMITS146C | METSMITS146C_0388 | 368 |
| METSMITS146C | METSMITS146C_0531 | 369 |
| METSMITS146C | METSMITS146C_0532 | 370 |
| METSMITS146C | METSMITS146C_0533 | 371 |
| METSMITS146C | METSMITS146C_0534 | 372 |
| METSMITS146C | METSMITS146C_0793 | 373 |
| METSMITS146C | METSMITS146C_0960 | 374 |
| METSMITS146C | METSMITS146C_1020 | 375 |
| METSMITS146C | METSMITS146C_1043 | 376 |
| METSMITS146C | METSMITS146C_1044 | 377 |
| METSMITS146C | METSMITS146C_1045 | 378 |
| METSMITS146C | METSMITS146C_1046 | 379 |
| METSMITS146C | METSMITS146C_1047 | 380 |
| METSMITS146C | METSMITS146C_1054 | 381 |
| METSMITS146C | METSMITS146C_1102 | 382 |
| METSMITS146C | METSMITS146C_1103 | 383 |
| METSMITS146C | METSMITS146C_1149 | 384 |
| METSMITS146C | METSMITS146C_1310 | 385 |
| METSMITS146C | METSMITS146C_1311 | 386 |
| METSMITS146C | METSMITS146C_1312 | 387 |
| METSMITS146C | METSMITS146C_1313 | 388 |
| METSMITS146C | METSMITS146C_1314 | 389 |
| METSMITS146C | METSMITS146C_1374 | 390 |
| METSMITS146C | METSMITS146C_1400 | 391 |
| METSMITS146C | METSMITS146C_1514 | 392 |
| METSMITS146C | METSMITS146C_1538 | 393 |
| METSMITS146C | METSMITS146C_1539 | 394 |
| METSMITS146C | METSMITS146C_1540 | 395 |
| METSMITS146C | METSMITS146C_1541 | 396 |
| METSMITS146C | METSMITS146C_1542 | 397 |
| METSMITS146C | METSMITS146C_1557 | 398 |
| METSMITS146C | METSMITS146C_1558 | 399 |
| METSMITS146C | METSMITS146C_1559 | 400 |
| METSMITS146C | METSMITS146C_1663 | 401 |
| METSMITS146C | METSMITS146C_1664 | 402 |
| METSMITS146C | METSMITS146C_1665 | 403 |
| METSMITS146C | METSMITS146C_1667 | 404 |
| METSMITS146C | METSMITS146C_1870 | 405 |
| METSMITS146C | METSMITS146C_1920 | 406 |
| METSMITS146C | METSMITS146C_1921 | 407 |
| METSMITS146C | METSMITS146C_1922 | 408 |
| METSMITS146C | METSMITS146C_1923 | 409 |
| METSMITS146C | METSMITS146C_1924 | 410 |
| METSMITS146C | METSMITS146C_1950 | 411 |
| METSMITS146C | METSMITS146C_1970 | 412 |
| METSMITS146C | METSMITS146C_1996 | 413 |
| METSMITS146C | METSMITS146C_1997 | 414 |
| METSMITS146C | METSMITS146C_1998 | 415 |
| METSMITS146C | METSMITS146C_2004 | 416 |
| METSMITS146C | METSMITS146C_2005 | 417 |
| METSMITS146C | METSMITS146C_2006 | 418 |
| METSMITS146C | METSMITS146C_2007 | 419 |
| METSMITS146C | METSMITS146C_2008 | 420 |
| METSMITS146C | METSMITS146C_2009 | 421 |
| METSMITS146C | METSMITS146C_2010 | 422 |
| METSMITS146C | METSMITS146C_2011 | 423 |
| METSMITS146C | METSMITS146C_2152 | 424 |
| METSMITS146C | METSMITS146C_2174 | 425 |
| METSMITS146C | METSMITS146C_2175 | 426 |
| METSMITS146C | METSMITS146C_2176 | 427 |
| METSMITS146C | METSMITS146C_2177 | 428 |
| METSMITS146C | METSMITS146C_2180 | 429 |
| METSMITS146C | METSMITS146C_2274 | 430 |
| METSMITS146D | METSMITS146D_0020 | 431 |
| METSMITS146D | METSMITS146D_0021 | 432 |
| METSMITS146D | METSMITS146D_0022 | 433 |
| METSMITS146D | METSMITS146D_0060 | 434 |
| METSMITS146D | METSMITS146D_0139 | 435 |
| METSMITS146D | METSMITS146D_0140 | 436 |
| METSMITS146D | METSMITS146D_0187 | 437 |
| METSMITS146D | METSMITS146D_0189 | 438 |
| METSMITS146D | METSMITS146D_0200 | 439 |
| METSMITS146D | METSMITS146D_0237 | 440 |
| METSMITS146D | METSMITS146D_0255 | 441 |
| METSMITS146D | METSMITS146D_0318 | 442 |
| METSMITS146D | METSMITS146D_0320 | 443 |
| METSMITS146D | METSMITS146D_0483 | 444 |
| METSMITS146D | METSMITS146D_0657 | 445 |
| METSMITS146D | METSMITS146D_0658 | 446 |
| METSMITS146D | METSMITS146D_0659 | 447 |
| METSMITS146D | METSMITS146D_0687 | 448 |
| METSMITS146D | METSMITS146D_0810 | 449 |
| METSMITS146D | METSMITS146D_0907 | 450 |
| METSMITS146D | METSMITS146D_0908 | 451 |
| METSMITS146D | METSMITS146D_0937 | 452 |
| METSMITS146D | METSMITS146D_0938 | 453 |
| METSMITS146D | METSMITS146D_0945 | 454 |
| METSMITS146D | METSMITS146D_0981 | 455 |
| METSMITS146D | METSMITS146D_1020 | 456 |
| METSMITS146D | METSMITS146D_1137 | 457 |
| METSMITS146D | METSMITS146D_1138 | 458 |
| METSMITS146D | METSMITS146D_1139 | 459 |
| METSMITS146D | METSMITS146D_1196 | 460 |
| METSMITS146D | METSMITS146D_1220 | 461 |
| METSMITS146D | METSMITS146D_1319 | 462 |
| METSMITS146D | METSMITS146D_1341 | 463 |
| METSMITS146D | METSMITS146D_1441 | 464 |
| METSMITS146D | METSMITS146D_1465 | 465 |
| METSMITS146D | METSMITS146D_1477 | 466 |
| METSMITS146D | METSMITS146D_1497 | 467 |
| METSMITS146D | METSMITS146D_1499 | 468 |
| METSMITS146D | METSMITS146D_1628 | 469 |
| METSMITS146D | METSMITS146D_1629 | 470 |
| METSMITS146D | METSMITS146D_1648 | 471 |
| METSMITS146D | METSMITS146D_1651 | 472 |
| METSMITS146D | METSMITS146D_1691 | 473 |
| METSMITS146E | METSMITS146E_0040 | 474 |
| METSMITS146E | METSMITS146E_0041 | 475 |
| METSMITS146E | METSMITS146E_0047 | 476 |
| METSMITS146E | METSMITS146E_0085 | 477 |
| METSMITS146E | METSMITS146E_0164 | 478 |
| METSMITS146E | METSMITS146E_0211 | 479 |
| METSMITS146E | METSMITS146E_0213 | 480 |
| METSMITS146E | METSMITS146E_0224 | 481 |
| METSMITS146E | METSMITS146E_0273 | 482 |
| METSMITS146E | METSMITS146E_0289 | 483 |
| METSMITS146E | METSMITS146E_0374 | 484 |
| METSMITS146E | METSMITS146E_0421 | 485 |
| METSMITS146E | METSMITS146E_0422 | 486 |
| METSMITS146E | METSMITS146E_0602 | 487 |
| METSMITS146E | METSMITS146E_0603 | 488 |
| METSMITS146E | METSMITS146E_0604 | 489 |
| METSMITS146E | METSMITS146E_0788 | 490 |
| METSMITS146E | METSMITS146E_0789 | 491 |
| METSMITS146E | METSMITS146E_0791 | 492 |
| METSMITS146E | METSMITS146E_0856 | 493 |
| METSMITS146E | METSMITS146E_0857 | 494 |
| METSMITS146E | METSMITS146E_0974 | 495 |
| METSMITS146E | METSMITS146E_1009 | 496 |
| METSMITS146E | METSMITS146E_1010 | 497 |
| METSMITS146E | METSMITS146E_1046 | 498 |
| METSMITS146E | METSMITS146E_1085 | 499 |
| METSMITS146E | METSMITS146E_1172 | 500 |
| METSMITS146E | METSMITS146E_1206 | 501 |
| METSMITS146E | METSMITS146E_1207 | 502 |
| METSMITS146E | METSMITS146E_1208 | 503 |
| METSMITS146E | METSMITS146E_1209 | 504 |
| METSMITS146E | METSMITS146E_1210 | 505 |
| METSMITS146E | METSMITS146E_1211 | 506 |
| METSMITS146E | METSMITS146E_1268 | 507 |
| METSMITS146E | METSMITS146E_1273 | 508 |
| METSMITS146E | METSMITS146E_1390 | 509 |
| METSMITS146E | METSMITS146E_1391 | 510 |
| METSMITS146E | METSMITS146E_1392 | 511 |
| METSMITS146E | METSMITS146E_1417 | 512 |
| METSMITS146E | METSMITS146E_1418 | 513 |
| METSMITS146E | METSMITS146E_1502 | 514 |
| METSMITS146E | METSMITS146E_1569 | 515 |
| METSMITS146E | METSMITS146E_1624 | 516 |
| METSMITS146E | METSMITS146E_1648 | 517 |
| METSMITS146E | METSMITS146E_1660 | 518 |
| METSMITS146E | METSMITS146E_1677 | 519 |
| METSMITS146E | METSMITS146E_1678 | 520 |
| METSMITS146E | METSMITS146E_1679 | 521 |
| METSMITS146E | METSMITS146E_1779 | 522 |
| METSMITS146E | METSMITS146E_1782 | 523 |
| METSMITS146E | METSMITS146E_1862 | 524 |
| METSMITS146E | METSMITS146E_1866 | 525 |
| METSMITS147A | METSMITS147A_0012 | 526 |
| METSMITS147A | METSMITS147A_0033 | 527 |
| METSMITS147A | METSMITS147A_0039 | 528 |
| METSMITS147A | METSMITS147A_0076 | 529 |
| METSMITS147A | METSMITS147A_0158 | 530 |
| METSMITS147A | METSMITS147A_0207 | 531 |
| METSMITS147A | METSMITS147A_0209 | 532 |
| METSMITS147A | METSMITS147A_0220 | 533 |
| METSMITS147A | METSMITS147A_0258 | 534 |
| METSMITS147A | METSMITS147A_0259 | 535 |
| METSMITS147A | METSMITS147A_0275 | 536 |
| METSMITS147A | METSMITS147A_0360 | 537 |
| METSMITS147A | METSMITS147A_0407 | 538 |
| METSMITS147A | METSMITS147A_0408 | 539 |
| METSMITS147A | METSMITS147A_0747 | 540 |
| METSMITS147A | METSMITS147A_0748 | 541 |
| METSMITS147A | METSMITS147A_0749 | 542 |
| METSMITS147A | METSMITS147A_0751 | 543 |
| METSMITS147A | METSMITS147A_0854 | 544 |
| METSMITS147A | METSMITS147A_0961 | 545 |
| METSMITS147A | METSMITS147A_0997 | 546 |
| METSMITS147A | METSMITS147A_0998 | 547 |
| METSMITS147A | METSMITS147A_1037 | 548 |
| METSMITS147A | METSMITS147A_1075 | 549 |
| METSMITS147A | METSMITS147A_1161 | 550 |
| METSMITS147A | METSMITS147A_1196 | 551 |
| METSMITS147A | METSMITS147A_1197 | 552 |
| METSMITS147A | METSMITS147A_1198 | 553 |
| METSMITS147A | METSMITS147A_1199 | 554 |
| METSMITS147A | METSMITS147A_1200 | 555 |
| METSMITS147A | METSMITS147A_1201 | 556 |
| METSMITS147A | METSMITS147A_1258 | 557 |
| METSMITS147A | METSMITS147A_1263 | 558 |
| METSMITS147A | METSMITS147A_1431 | 559 |
| METSMITS147A | METSMITS147A_1432 | 560 |
| METSMITS147A | METSMITS147A_1458 | 561 |
| METSMITS147A | METSMITS147A_1538 | 562 |
| METSMITS147A | METSMITS147A_1605 | 563 |
| METSMITS147A | METSMITS147A_1671 | 564 |
| METSMITS147A | METSMITS147A_1672 | 565 |
| METSMITS147A | METSMITS147A_1696 | 566 |
| METSMITS147A | METSMITS147A_1709 | 567 |
| METSMITS147A | METSMITS147A_1710 | 568 |
| METSMITS147A | METSMITS147A_1727 | 569 |
| METSMITS147A | METSMITS147A_1728 | 570 |
| METSMITS147A | METSMITS147A_1840 | 571 |
| METSMITS147A | METSMITS147A_1844 | 572 |
| METSMITS147A | METSMITS147A_1954 | 573 |
| METSMITS147A | METSMITS147A_1955 | 574 |
| METSMITS147A | METSMITS147A_1965 | 575 |
| METSMITS147A | METSMITS147A_1966 | 576 |
| METSMITS147B | METSMITS147B_0020 | 577 |
| METSMITS147B | METSMITS147B_0040 | 578 |
| METSMITS147B | METSMITS147B_0041 | 579 |
| METSMITS147B | METSMITS147B_0047 | 580 |
| METSMITS147B | METSMITS147B_0083 | 581 |
| METSMITS147B | METSMITS147B_0165 | 582 |
| METSMITS147B | METSMITS147B_0212 | 583 |
| METSMITS147B | METSMITS147B_0214 | 584 |
| METSMITS147B | METSMITS147B_0225 | 585 |
| METSMITS147B | METSMITS147B_0226 | 586 |
| METSMITS147B | METSMITS147B_0227 | 587 |
| METSMITS147B | METSMITS147B_0275 | 588 |
| METSMITS147B | METSMITS147B_0291 | 589 |
| METSMITS147B | METSMITS147B_0377 | 590 |
| METSMITS147B | METSMITS147B_0424 | 591 |
| METSMITS147B | METSMITS147B_0425 | 592 |
| METSMITS147B | METSMITS147B_0608 | 593 |
| METSMITS147B | METSMITS147B_0609 | 594 |
| METSMITS147B | METSMITS147B_0610 | 595 |
| METSMITS147B | METSMITS147B_0899 | 596 |
| METSMITS147B | METSMITS147B_0900 | 597 |
| METSMITS147B | METSMITS147B_1017 | 598 |
| METSMITS147B | METSMITS147B_1052 | 599 |
| METSMITS147B | METSMITS147B_1053 | 600 |
| METSMITS147B | METSMITS147B_1089 | 601 |
| METSMITS147B | METSMITS147B_1128 | 602 |
| METSMITS147B | METSMITS147B_1129 | 603 |
| METSMITS147B | METSMITS147B_1130 | 604 |
| METSMITS147B | METSMITS147B_1216 | 605 |
| METSMITS147B | METSMITS147B_1251 | 606 |
| METSMITS147B | METSMITS147B_1252 | 607 |
| METSMITS147B | METSMITS147B_1253 | 608 |
| METSMITS147B | METSMITS147B_1254 | 609 |
| METSMITS147B | METSMITS147B_1255 | 610 |
| METSMITS147B | METSMITS147B_1256 | 611 |
| METSMITS147B | METSMITS147B_1313 | 612 |
| METSMITS147B | METSMITS147B_1318 | 613 |
| METSMITS147B | METSMITS147B_1435 | 614 |
| METSMITS147B | METSMITS147B_1436 | 615 |
| METSMITS147B | METSMITS147B_1437 | 615 |
| METSMITS147B | METSMITS147B_1530 | 617 |
| METSMITS147B | METSMITS147B_1545 | 618 |
| METSMITS147B | METSMITS147B_1556 | 619 |
| METSMITS147B | METSMITS147B_1558 | 620 |
| METSMITS147B | METSMITS147B_1559 | 621 |
| METSMITS147B | METSMITS147B_1661 | 622 |
| METSMITS147B | METSMITS147B_1717 | 623 |
| METSMITS147B | METSMITS147B_1741 | 624 |
| METSMITS147B | METSMITS147B_1753 | 625 |
| METSMITS147B | METSMITS147B_1817 | 626 |
| METSMITS147B | METSMITS147B_1821 | 627 |
| METSMITS147B | METSMITS147B_1895 | 628 |
| METSMITS147B | METSMITS147B_1898 | 629 |
| METSMITS147C | METSMITS147C_0021 | 630 |
| METSMITS147C | METSMITS147C_0022 | 631 |
| METSMITS147C | METSMITS147C_0029 | 632 |
| METSMITS147C | METSMITS147C_0075 | 633 |
| METSMITS147C | METSMITS147C_0159 | 634 |
| METSMITS147C | METSMITS147C_0162 | 635 |
| METSMITS147C | METSMITS147C_0163 | 636 |
| METSMITS147C | METSMITS147C_0211 | 637 |
| METSMITS147C | METSMITS147C_0213 | 638 |
| METSMITS147C | METSMITS147C_0224 | 639 |
| METSMITS147C | METSMITS147C_0283 | 640 |
| METSMITS147C | METSMITS147C_0299 | 641 |
| METSMITS147C | METSMITS147C_0388 | 642 |
| METSMITS147C | METSMITS147C_0389 | 643 |
| METSMITS147C | METSMITS147C_0438 | 644 |
| METSMITS147C | METSMITS147C_0439 | 645 |
| METSMITS147C | METSMITS147C_0630 | 646 |
| METSMITS147C | METSMITS147C_0631 | 647 |
| METSMITS147C | METSMITS147C_0632 | 648 |
| METSMITS147C | METSMITS147C_0633 | 649 |
| METSMITS147C | METSMITS147C_0856 | 650 |
| METSMITS147C | METSMITS147C_0857 | 651 |
| METSMITS147C | METSMITS147C_0859 | 652 |
| METSMITS147C | METSMITS147C_0893 | 653 |
| METSMITS147C | METSMITS147C_0934 | 654 |
| METSMITS147C | METSMITS147C_0935 | 655 |
| METSMITS147C | METSMITS147C_0972 | 656 |
| METSMITS147C | METSMITS147C_1012 | 657 |
| METSMITS147C | METSMITS147C_1013 | 658 |
| METSMITS147C | METSMITS147C_1099 | 659 |
| METSMITS147C | METSMITS147C_1100 | 660 |
| METSMITS147C | METSMITS147C_1134 | 661 |
| METSMITS147C | METSMITS147C_1135 | 662 |
| METSMITS147C | METSMITS147C_1136 | 663 |
| METSMITS147C | METSMITS147C_1137 | 664 |
| METSMITS147C | METSMITS147C_1138 | 665 |
| METSMITS147C | METSMITS147C_1139 | 666 |
| METSMITS147C | METSMITS147C_1140 | 667 |
| METSMITS147C | METSMITS147C_1141 | 668 |
| METSMITS147C | METSMITS147C_1197 | 669 |
| METSMITS147C | METSMITS147C_1201 | 670 |
| METSMITS147C | METSMITS147C_1318 | 671 |
| METSMITS147C | METSMITS147C_1319 | 672 |
| METSMITS147C | METSMITS147C_1433 | 673 |
| METSMITS147C | METSMITS147C_1524 | 674 |
| METSMITS147C | METSMITS147C_1695 | 675 |
| METSMITS147C | METSMITS147C_1751 | 676 |
| METSMITS147C | METSMITS147C_1775 | 677 |
| METSMITS147C | METSMITS147C_1856 | 678 |
| METSMITS147C | METSMITS147C_1860 | 679 |
| METSMITS147C | METSMITS147C_1965 | 680 |
| METSMITS147C | METSMITS147C_1978 | 681 |
| METSMITS147C | METSMITS147C_2005 | 682 |
| METSMITS94A | METSMITS94A_0032 | 683 |
| METSMITS94A | METSMITS94A_0162 | 684 |
| METSMITS94A | METSMITS94A_0164 | 685 |
| METSMITS94A | METSMITS94A_0209 | 686 |
| METSMITS94A | METSMITS94A_0220 | 687 |
| METSMITS94A | METSMITS94A_0221 | 688 |
| METSMITS94A | METSMITS94A_0232 | 689 |
| METSMITS94A | METSMITS94A_0312 | 690 |
| METSMITS94A | METSMITS94A_0358 | 691 |
| METSMITS94A | METSMITS94A_0359 | 692 |
| METSMITS94A | METSMITS94A_0409 | 693 |
| METSMITS94A | METSMITS94A_0713 | 694 |
| METSMITS94A | METSMITS94A_0714 | 695 |
| METSMITS94A | METSMITS94A_0716 | 696 |
| METSMITS94A | METSMITS94A_0730 | 697 |
| METSMITS94A | METSMITS94A_0731 | 698 |
| METSMITS94A | METSMITS94A_0732 | 699 |
| METSMITS94A | METSMITS94A_0733 | 700 |
| METSMITS94A | METSMITS94A_0796 | 701 |
| METSMITS94A | METSMITS94A_0898 | 702 |
| METSMITS94A | METSMITS94A_0933 | 703 |
| METSMITS94A | METSMITS94A_0934 | 704 |
| METSMITS94A | METSMITS94A_0971 | 705 |
| METSMITS94A | METSMITS94A_1009 | 706 |
| METSMITS94A | METSMITS94A_1128 | 707 |
| METSMITS94A | METSMITS94A_1129 | 708 |
| METSMITS94A | METSMITS94A_1130 | 709 |
| METSMITS94A | METSMITS94A_1131 | 710 |
| METSMITS94A | METSMITS94A_1163 | 711 |
| METSMITS94A | METSMITS94A_1195 | 712 |
| METSMITS94A | METSMITS94A_1199 | 713 |
| METSMITS94A | METSMITS94A_1322 | 714 |
| METSMITS94A | METSMITS94A_1323 | 715 |
| METSMITS94A | METSMITS94A_1348 | 716 |
| METSMITS94A | METSMITS94A_1429 | 717 |
| METSMITS94A | METSMITS94A_1430 | 718 |
| METSMITS94A | METSMITS94A_1431 | 719 |
| METSMITS94A | METSMITS94A_1501 | 720 |
| METSMITS94A | METSMITS94A_1559 | 721 |
| METSMITS94A | METSMITS94A_1589 | 722 |
| METSMITS94A | METSMITS94A_1603 | 723 |
| METSMITS94A | METSMITS94A_1622 | 724 |
| METSMITS94A | METSMITS94A_1623 | 725 |
| METSMITS94A | METSMITS94A_1624 | 726 |
| METSMITS94A | METSMITS94A_1625 | 727 |
| METSMITS94A | METSMITS94A_1722 | 728 |
| METSMITS94A | METSMITS94A_1725 | 729 |
| METSMITS94A | METSMITS94A_1766 | 730 |
| METSMITS94A | METSMITS94A_1786 | 731 |
| METSMITS94A | METSMITS94A_1787 | 732 |
| METSMITS94A | METSMITS94A_1790 | 733 |
| METSMITS94A | METSMITS94A_1796 | 734 |
| METSMITS94B | METSMITS94B_0013 | 735 |
| METSMITS94B | METSMITS94B_0146 | 736 |
| METSMITS94B | METSMITS94B_0148 | 737 |
| METSMITS94B | METSMITS94B_0157 | 738 |
| METSMITS94B | METSMITS94B_0158 | 739 |
| METSMITS94B | METSMITS94B_0159 | 740 |
| METSMITS94B | METSMITS94B_0166 | 741 |
| METSMITS94B | METSMITS94B_0167 | 742 |
| METSMITS94B | METSMITS94B_0207 | 743 |
| METSMITS94B | METSMITS94B_0219 | 744 |
| METSMITS94B | METSMITS94B_0220 | 745 |
| METSMITS94B | METSMITS94B_0231 | 746 |
| METSMITS94B | METSMITS94B_0312 | 747 |
| METSMITS94B | METSMITS94B_0359 | 748 |
| METSMITS94B | METSMITS94B_0360 | 749 |
| METSMITS94B | METSMITS94B_0411 | 750 |
| METSMITS94B | METSMITS94B_0412 | 751 |
| METSMITS94B | METSMITS94B_0719 | 752 |
| METSMITS94B | METSMITS94B_0720 | 753 |
| METSMITS94B | METSMITS94B_0721 | 754 |
| METSMITS94B | METSMITS94B_0724 | 755 |
| METSMITS94B | METSMITS94B_0725 | 756 |
| METSMITS94B | METSMITS94B_0726 | 757 |
| METSMITS94B | METSMITS94B_0788 | 758 |
| METSMITS94B | METSMITS94B_0892 | 759 |
| METSMITS94B | METSMITS94B_0927 | 760 |
| METSMITS94B | METSMITS94B_0928 | 761 |
| METSMITS94B | METSMITS94B_0966 | 762 |
| METSMITS94B | METSMITS94B_1130 | 763 |
| METSMITS94B | METSMITS94B_1131 | 764 |
| METSMITS94B | METSMITS94B_1132 | 765 |
| METSMITS94B | METSMITS94B_1133 | 766 |
| METSMITS94B | METSMITS94B_1134 | 767 |
| METSMITS94B | METSMITS94B_1166 | 768 |
| METSMITS94B | METSMITS94B_1197 | 769 |
| METSMITS94B | METSMITS94B_1201 | 770 |
| METSMITS94B | METSMITS94B_1328 | 771 |
| METSMITS94B | METSMITS94B_1329 | 772 |
| METSMITS94B | METSMITS94B_1353 | 773 |
| METSMITS94B | METSMITS94B_1354 | 774 |
| METSMITS94B | METSMITS94B_1446 | 775 |
| METSMITS94B | METSMITS94B_1517 | 776 |
| METSMITS94B | METSMITS94B_1579 | 777 |
| METSMITS94B | METSMITS94B_1611 | 778 |
| METSMITS94B | METSMITS94B_1612 | 780 |
| METSMITS94B | METSMITS94B_1627 | 781 |
| METSMITS94B | METSMITS94B_1648 | 782 |
| METSMITS94B | METSMITS94B_1649 | 783 |
| METSMITS94B | METSMITS94B_1650 | 784 |
| METSMITS94B | METSMITS94B_1651 | 785 |
| METSMITS94B | METSMITS94B_1752 | 786 |
| METSMITS94B | METSMITS94B_1755 | 787 |
| METSMITS94B | METSMITS94B_1797 | 788 |
| METSMITS94B | METSMITS94B_1818 | 789 |
| METSMITS94B | METSMITS94B_1819 | 790 |
| METSMITS94B | METSMITS94B_1822 | 791 |
| METSMITS94B | METSMITS94B_1829 | 792 |
| METSMITS94C | METSMITS94C_0005 | 793 |
| METSMITS94C | METSMITS94C_0041 | 794 |
| METSMITS94C | METSMITS94C_0169 | 795 |
| METSMITS94C | METSMITS94C_0171 | 796 |
| METSMITS94C | METSMITS94C_0180 | 797 |
| METSMITS94C | METSMITS94C_0216 | 798 |
| METSMITS94C | METSMITS94C_0228 | 799 |
| METSMITS94C | METSMITS94C_0229 | 800 |
| METSMITS94C | METSMITS94C_0240 | 801 |
| METSMITS94C | METSMITS94C_0320 | 802 |
| METSMITS94C | METSMITS94C_0321 | 803 |
| METSMITS94C | METSMITS94C_0367 | 804 |
| METSMITS94C | METSMITS94C_0368 | 805 |
| METSMITS94C | METSMITS94C_0419 | 806 |
| METSMITS94C | METSMITS94C_0716 | 807 |
| METSMITS94C | METSMITS94C_0717 | 808 |
| METSMITS94C | METSMITS94C_0719 | 809 |
| METSMITS94C | METSMITS94C_0783 | 810 |
| METSMITS94C | METSMITS94C_0884 | 811 |
| METSMITS94C | METSMITS94C_0918 | 812 |
| METSMITS94C | METSMITS94C_0919 | 813 |
| METSMITS94C | METSMITS94C_0956 | 814 |
| METSMITS94C | METSMITS94C_1115 | 815 |
| METSMITS94C | METSMITS94C_1116 | 816 |
| METSMITS94C | METSMITS94C_1117 | 817 |
| METSMITS94C | METSMITS94C_1118 | 818 |
| METSMITS94C | METSMITS94C_1154 | 819 |
| METSMITS94C | METSMITS94C_1155 | 820 |
| METSMITS94C | METSMITS94C_1186 | 821 |
| METSMITS94C | METSMITS94C_1190 | 822 |
| METSMITS94C | METSMITS94C_1318 | 823 |
| METSMITS94C | METSMITS94C_1319 | 824 |
| METSMITS94C | METSMITS94C_1320 | 825 |
| METSMITS94C | METSMITS94C_1344 | 826 |
| METSMITS94C | METSMITS94C_1427 | 827 |
| METSMITS94C | METSMITS94C_1428 | 828 |
| METSMITS94C | METSMITS94C_1429 | 829 |
| METSMITS94C | METSMITS94C_1430 | 830 |
| METSMITS94C | METSMITS94C_1507 | 831 |
| METSMITS94C | METSMITS94C_1563 | 832 |
| METSMITS94C | METSMITS94C_1585 | 833 |
| METSMITS94C | METSMITS94C_1597 | 834 |
| METSMITS94C | METSMITS94C_1615 | 835 |
| METSMITS94C | METSMITS94C_1616 | 836 |
| METSMITS94C | METSMITS94C_1617 | 837 |
| METSMITS94C | METSMITS94C_1715 | 838 |
| METSMITS94C | METSMITS94C_1718 | 839 |
| METSMITS94C | METSMITS94C_1759 | 840 |
| METSMITS94C | METSMITS94C_1779 | 841 |
| METSMITS94C | METSMITS94C_1780 | 842 |
| METSMITS94C | METSMITS94C_1783 | 843 |
| METSMITS94C | METSMITS94C_1794 | 844 |
| METSMITS95A | METSMITS95A_0027 | 845 |
| METSMITS95A | METSMITS95A_0049 | 846 |
| METSMITS95A | METSMITS95A_0050 | 847 |
| METSMITS95A | METSMITS95A_0052 | 848 |
| METSMITS95A | METSMITS95A_0057 | 849 |
| METSMITS95A | METSMITS95A_0095 | 850 |
| METSMITS95A | METSMITS95A_0186 | 851 |
| METSMITS95A | METSMITS95A_0187 | 852 |
| METSMITS95A | METSMITS95A_0234 | 853 |
| METSMITS95A | METSMITS95A_0235 | 854 |
| METSMITS95A | METSMITS95A_0237 | 855 |
| METSMITS95A | METSMITS95A_0285 | 856 |
| METSMITS95A | METSMITS95A_0297 | 857 |
| METSMITS95A | METSMITS95A_0309 | 858 |
| METSMITS95A | METSMITS95A_0418 | 859 |
| METSMITS95A | METSMITS95A_0466 | 860 |
| METSMITS95A | METSMITS95A_0467 | 861 |
| METSMITS95A | METSMITS95A_0769 | 862 |
| METSMITS95A | METSMITS95A_0770 | 863 |
| METSMITS95A | METSMITS95A_0771 | 864 |
| METSMITS95A | METSMITS95A_0772 | 865 |
| METSMITS95A | METSMITS95A_0773 | 866 |
| METSMITS95A | METSMITS95A_0774 | 867 |
| METSMITS95A | METSMITS95A_0775 | 868 |
| METSMITS95A | METSMITS95A_0840 | 869 |
| METSMITS95A | METSMITS95A_0945 | 870 |
| METSMITS95A | METSMITS95A_0982 | 871 |
| METSMITS95A | METSMITS95A_0983 | 872 |
| METSMITS95A | METSMITS95A_1021 | 873 |
| METSMITS95A | METSMITS95A_1064 | 874 |
| METSMITS95A | METSMITS95A_1065 | 875 |
| METSMITS95A | METSMITS95A_1159 | 876 |
| METSMITS95A | METSMITS95A_1195 | 877 |
| METSMITS95A | METSMITS95A_1196 | 878 |
| METSMITS95A | METSMITS95A_1197 | 879 |
| METSMITS95A | METSMITS95A_1198 | 880 |
| METSMITS95A | METSMITS95A_1199 | 881 |
| METSMITS95A | METSMITS95A_1200 | 882 |
| METSMITS95A | METSMITS95A_1234 | 883 |
| METSMITS95A | METSMITS95A_1235 | 884 |
| METSMITS95A | METSMITS95A_1269 | 885 |
| METSMITS95A | METSMITS95A_1273 | 886 |
| METSMITS95A | METSMITS95A_1406 | 887 |
| METSMITS95A | METSMITS95A_1407 | 888 |
| METSMITS95A | METSMITS95A_1432 | 889 |
| METSMITS95A | METSMITS95A_1443 | 890 |
| METSMITS95A | METSMITS95A_1447 | 891 |
| METSMITS95A | METSMITS95A_1448 | 892 |
| METSMITS95A | METSMITS95A_1487 | 893 |
| METSMITS95A | METSMITS95A_1571 | 894 |
| METSMITS95A | METSMITS95A_1646 | 895 |
| METSMITS95A | METSMITS95A_1727 | 896 |
| METSMITS95A | METSMITS95A_1728 | 897 |
| METSMITS95A | METSMITS95A_1744 | 898 |
| METSMITS95A | METSMITS95A_1762 | 899 |
| METSMITS95A | METSMITS95A_1763 | 900 |
| METSMITS95A | METSMITS95A_1764 | 901 |
| METSMITS95A | METSMITS95A_1765 | 902 |
| METSMITS95A | METSMITS95A_1766 | 903 |
| METSMITS95A | METSMITS95A_1767 | 904 |
| METSMITS95A | METSMITS95A_1770 | 905 |
| METSMITS95A | METSMITS95A_1771 | 906 |
| METSMITS95A | METSMITS95A_1772 | 907 |
| METSMITS95A | METSMITS95A_1857 | 908 |
| METSMITS95A | METSMITS95A_1877 | 909 |
| METSMITS95A | METSMITS95A_1878 | 910 |
| METSMITS95A | METSMITS95A_1882 | 911 |
| METSMITS95A | METSMITS95A_1953 | 912 |
| METSMITS95A | METSMITS95A_1954 | 913 |
| METSMITS95A | METSMITS95A_1956 | 914 |
| METSMITS95A | METSMITS95A_1960 | 915 |
| METSMITS95B | METSMITS95B_0044 | 916 |
| METSMITS95B | METSMITS95B_0045 | 917 |
| METSMITS95B | METSMITS95B_0047 | 918 |
| METSMITS95B | METSMITS95B_0054 | 919 |
| METSMITS95B | METSMITS95B_0089 | 920 |
| METSMITS95B | METSMITS95B_0182 | 921 |
| METSMITS95B | METSMITS95B_0183 | 922 |
| METSMITS95B | METSMITS95B_0232 | 923 |
| METSMITS95B | METSMITS95B_0234 | 924 |
| METSMITS95B | METSMITS95B_0279 | 925 |
| METSMITS95B | METSMITS95B_0290 | 926 |
| METSMITS95B | METSMITS95B_0302 | 927 |
| METSMITS95B | METSMITS95B_0409 | 928 |
| METSMITS95B | METSMITS95B_0456 | 929 |
| METSMITS95B | METSMITS95B_0457 | 930 |
| METSMITS95B | METSMITS95B_0458 | 931 |
| METSMITS95B | METSMITS95B_0758 | 932 |
| METSMITS95B | METSMITS95B_0759 | 933 |
| METSMITS95B | METSMITS95B_0760 | 934 |
| METSMITS95B | METSMITS95B_0761 | 935 |
| METSMITS95B | METSMITS95B_0823 | 936 |
| METSMITS95B | METSMITS95B_0929 | 937 |
| METSMITS95B | METSMITS95B_0968 | 938 |
| METSMITS95B | METSMITS95B_0969 | 939 |
| METSMITS95B | METSMITS95B_0970 | 940 |
| METSMITS95B | METSMITS95B_1007 | 941 |
| METSMITS95B | METSMITS95B_1046 | 942 |
| METSMITS95B | METSMITS95B_1134 | 943 |
| METSMITS95B | METSMITS95B_1169 | 944 |
| METSMITS95B | METSMITS95B_1170 | 945 |
| METSMITS95B | METSMITS95B_1171 | 946 |
| METSMITS95B | METSMITS95B_1172 | 947 |
| METSMITS95B | METSMITS95B_1173 | 948 |
| METSMITS95B | METSMITS95B_1234 | 949 |
| METSMITS95B | METSMITS95B_1238 | 950 |
| METSMITS95B | METSMITS95B_1365 | 951 |
| METSMITS95B | METSMITS95B_1366 | 952 |
| METSMITS95B | METSMITS95B_1476 | 953 |
| METSMITS95B | METSMITS95B_1487 | 954 |
| METSMITS95B | METSMITS95B_1489 | 955 |
| METSMITS95B | METSMITS95B_1490 | 956 |
| METSMITS95B | METSMITS95B_1601 | 957 |
| METSMITS95B | METSMITS95B_1665 | 958 |
| METSMITS95B | METSMITS95B_1679 | 959 |
| METSMITS95B | METSMITS95B_1697 | 960 |
| METSMITS95B | METSMITS95B_1698 | 961 |
| METSMITS95B | METSMITS95B_1699 | 962 |
| METSMITS95B | METSMITS95B_1701 | 963 |
| METSMITS95B | METSMITS95B_1702 | 964 |
| METSMITS95B | METSMITS95B_1703 | 965 |
| METSMITS95B | METSMITS95B_1706 | 966 |
| METSMITS95B | METSMITS95B_1707 | 967 |
| METSMITS95B | METSMITS95B_1708 | 968 |
| METSMITS95B | METSMITS95B_1781 | 969 |
| METSMITS95B | METSMITS95B_1802 | 970 |
| METSMITS95B | METSMITS95B_1806 | 971 |
| METSMITS95B | METSMITS95B_1890 | 972 |
| METSMITS95B | METSMITS95B_1894 | 973 |
| METSMITS95C | METSMITS95C_0085 | 974 |
| METSMITS95C | METSMITS95C_0104 | 975 |
| METSMITS95C | METSMITS95C_0105 | 976 |
| METSMITS95C | METSMITS95C_0107 | 977 |
| METSMITS95C | METSMITS95C_0112 | 978 |
| METSMITS95C | METSMITS95C_0150 | 979 |
| METSMITS95C | METSMITS95C_0242 | 980 |
| METSMITS95C | METSMITS95C_0289 | 981 |
| METSMITS95C | METSMITS95C_0291 | 982 |
| METSMITS95C | METSMITS95C_0336 | 983 |
| METSMITS95C | METSMITS95C_0348 | 984 |
| METSMITS95C | METSMITS95C_0358 | 985 |
| METSMITS95C | METSMITS95C_0464 | 986 |
| METSMITS95C | METSMITS95C_0510 | 987 |
| METSMITS95C | METSMITS95C_0511 | 988 |
| METSMITS95C | METSMITS95C_0811 | 989 |
| METSMITS95C | METSMITS95C_0812 | 990 |
| METSMITS95C | METSMITS95C_0813 | 991 |
| METSMITS95C | METSMITS95C_0814 | 992 |
| METSMITS95C | METSMITS95C_0875 | 993 |
| METSMITS95C | METSMITS95C_0981 | 994 |
| METSMITS95C | METSMITS95C_1019 | 995 |
| METSMITS95C | METSMITS95C_1020 | 996 |
| METSMITS95C | METSMITS95C_1056 | 997 |
| METSMITS95C | METSMITS95C_1095 | 998 |
| METSMITS95C | METSMITS95C_1180 | 999 |
| METSMITS95C | METSMITS95C_1215 | 1000 |
| METSMITS95C | METSMITS95C_1216 | 1001 |
| METSMITS95C | METSMITS95C_1217 | 1002 |
| METSMITS95C | METSMITS95C_1218 | 1003 |
| METSMITS95C | METSMITS95C_1246 | 1004 |
| METSMITS95C | METSMITS95C_1278 | 1005 |
| METSMITS95C | METSMITS95C_1282 | 1006 |
| METSMITS95C | METSMITS95C_1407 | 1007 |
| METSMITS95C | METSMITS95C_1408 | 1008 |
| METSMITS95C | METSMITS95C_1516 | 1009 |
| METSMITS95C | METSMITS95C_1527 | 1010 |
| METSMITS95C | METSMITS95C_1529 | 1011 |
| METSMITS95C | METSMITS95C_1530 | 1012 |
| METSMITS95C | METSMITS95C_1640 | 1013 |
| METSMITS95C | METSMITS95C_1713 | 1014 |
| METSMITS95C | METSMITS95C_1727 | 1015 |
| METSMITS95C | METSMITS95C_1732 | 1016 |
| METSMITS95C | METSMITS95C_1751 | 1017 |
| METSMITS95C | METSMITS95C_1752 | 1018 |
| METSMITS95C | METSMITS95C_1753 | 1019 |
| METSMITS95C | METSMITS95C_1754 | 1020 |
| METSMITS95C | METSMITS95C_1755 | 1021 |
| METSMITS95C | METSMITS95C_1757 | 1022 |
| METSMITS95C | METSMITS95C_1758 | 1023 |
| METSMITS95C | METSMITS95C_1837 | 1024 |
| METSMITS95C | METSMITS95C_1857 | 1025 |
| METSMITS95C | METSMITS95C_1861 | 1026 |
| METSMITS95C | METSMITS95C_1874 | 1027 |
| METSMITS95D | METSMITS95D_0029 | 1028 |
| METSMITS95D | METSMITS95D_0050 | 1029 |
| METSMITS95D | METSMITS95D_0051 | 1030 |
| METSMITS95D | METSMITS95D_0052 | 1031 |
| METSMITS95D | METSMITS95D_0053 | 1032 |
| METSMITS95D | METSMITS95D_0055 | 1033 |
| METSMITS95D | METSMITS95D_0060 | 1034 |
| METSMITS95D | METSMITS95D_0097 | 1035 |
| METSMITS95D | METSMITS95D_0238 | 1036 |
| METSMITS95D | METSMITS95D_0240 | 1037 |
| METSMITS95D | METSMITS95D_0285 | 1038 |
| METSMITS95D | METSMITS95D_0296 | 1039 |
| METSMITS95D | METSMITS95D_0307 | 1040 |
| METSMITS95D | METSMITS95D_0411 | 1041 |
| METSMITS95D | METSMITS95D_0412 | 1042 |
| METSMITS95D | METSMITS95D_0458 | 1043 |
| METSMITS95D | METSMITS95D_0459 | 1044 |
| METSMITS95D | METSMITS95D_0726 | 1045 |
| METSMITS95D | METSMITS95D_0727 | 1046 |
| METSMITS95D | METSMITS95D_0728 | 1047 |
| METSMITS95D | METSMITS95D_0729 | 1048 |
| METSMITS95D | METSMITS95D_0730 | 1049 |
| METSMITS95D | METSMITS95D_0790 | 1050 |
| METSMITS95D | METSMITS95D_0892 | 1051 |
| METSMITS95D | METSMITS95D_0927 | 1052 |
| METSMITS95D | METSMITS95D_0928 | 1053 |
| METSMITS95D | METSMITS95D_0964 | 1054 |
| METSMITS95D | METSMITS95D_1003 | 1055 |
| METSMITS95D | METSMITS95D_1089 | 1056 |
| METSMITS95D | METSMITS95D_1123 | 1057 |
| METSMITS95D | METSMITS95D_1124 | 1058 |
| METSMITS95D | METSMITS95D_1125 | 1059 |
| METSMITS95D | METSMITS95D_1126 | 1060 |
| METSMITS95D | METSMITS95D_1127 | 1061 |
| METSMITS95D | METSMITS95D_1129 | 1062 |
| METSMITS95D | METSMITS95D_1130 | 1063 |
| METSMITS95D | METSMITS95D_1131 | 1064 |
| METSMITS95D | METSMITS95D_1189 | 1065 |
| METSMITS95D | METSMITS95D_1193 | 1066 |
| METSMITS95D | METSMITS95D_1316 | 1067 |
| METSMITS95D | METSMITS95D_1317 | 1068 |
| METSMITS95D | METSMITS95D_1423 | 1069 |
| METSMITS95D | METSMITS95D_1433 | 1070 |
| METSMITS95D | METSMITS95D_1435 | 1071 |
| METSMITS95D | METSMITS95D_1436 | 1072 |
| METSMITS95D | METSMITS95D_1540 | 1073 |
| METSMITS95D | METSMITS95D_1619 | 1074 |
| METSMITS95D | METSMITS95D_1632 | 1075 |
| METSMITS95D | METSMITS95D_1633 | 1076 |
| METSMITS95D | METSMITS95D_1634 | 1077 |
| METSMITS95D | METSMITS95D_1636 | 1078 |
| METSMITS95D | METSMITS95D_1637 | 1079 |
| METSMITS95D | METSMITS95D_1654 | 1080 |
| METSMITS95D | METSMITS95D_1655 | 1081 |
| METSMITS95D | METSMITS95D_1656 | 1082 |
| METSMITS95D | METSMITS95D_1657 | 1083 |
| METSMITS95D | METSMITS95D_1731 | 1084 |
| METSMITS95D | METSMITS95D_1751 | 1085 |
| METSMITS95D | METSMITS95D_1755 | 1086 |
| METSMITS95D | METSMITS95D_1804 | 1087 |
| METSMITS95D | METSMITS95D_1859 | 1088 |
| METSMITS96A | METSMITS96A_0055 | 1089 |
| METSMITS96A | METSMITS96A_0074 | 1090 |
| METSMITS96A | METSMITS96A_0075 | 1091 |
| METSMITS96A | METSMITS96A_0077 | 1092 |
| METSMITS96A | METSMITS96A_0082 | 1093 |
| METSMITS96A | METSMITS96A_0118 | 1094 |
| METSMITS96A | METSMITS96A_0191 | 1095 |
| METSMITS96A | METSMITS96A_0238 | 1096 |
| METSMITS96A | METSMITS96A_0240 | 1097 |
| METSMITS96A | METSMITS96A_0285 | 1098 |
| METSMITS96A | METSMITS96A_0296 | 1099 |
| METSMITS96A | METSMITS96A_0307 | 1100 |
| METSMITS96A | METSMITS96A_0414 | 1101 |
| METSMITS96A | METSMITS96A_0460 | 1102 |
| METSMITS96A | METSMITS96A_0461 | 1103 |
| METSMITS96A | METSMITS96A_0802 | 1104 |
| METSMITS96A | METSMITS96A_0907 | 1105 |
| METSMITS96A | METSMITS96A_0957 | 1106 |
| METSMITS96A | METSMITS96A_0958 | 1107 |
| METSMITS96A | METSMITS96A_0994 | 1108 |
| METSMITS96A | METSMITS96A_1032 | 1109 |
| METSMITS96A | METSMITS96A_1033 | 1110 |
| METSMITS96A | METSMITS96A_1119 | 1111 |
| METSMITS96A | METSMITS96A_1153 | 1112 |
| METSMITS96A | METSMITS96A_1154 | 1113 |
| METSMITS96A | METSMITS96A_1155 | 1114 |
| METSMITS96A | METSMITS96A_1156 | 1115 |
| METSMITS96A | METSMITS96A_1159 | 1116 |
| METSMITS96A | METSMITS96A_1188 | 1117 |
| METSMITS96A | METSMITS96A_1219 | 1118 |
| METSMITS96A | METSMITS96A_1223 | 1119 |
| METSMITS96A | METSMITS96A_1347 | 1120 |
| METSMITS96A | METSMITS96A_1348 | 1121 |
| METSMITS96A | METSMITS96A_1349 | 1122 |
| METSMITS96A | METSMITS96A_1455 | 1123 |
| METSMITS96A | METSMITS96A_1466 | 1124 |
| METSMITS96A | METSMITS96A_1468 | 1125 |
| METSMITS96A | METSMITS96A_1469 | 1126 |
| METSMITS96A | METSMITS96A_1512 | 1127 |
| METSMITS96A | METSMITS96A_1513 | 1128 |
| METSMITS96A | METSMITS96A_1514 | 1129 |
| METSMITS96A | METSMITS96A_1515 | 1130 |
| METSMITS96A | METSMITS96A_1586 | 1131 |
| METSMITS96A | METSMITS96A_1662 | 1132 |
| METSMITS96A | METSMITS96A_1674 | 1133 |
| METSMITS96A | METSMITS96A_1675 | 1134 |
| METSMITS96A | METSMITS96A_1677 | 1135 |
| METSMITS96A | METSMITS96A_1678 | 1136 |
| METSMITS96A | METSMITS96A_1697 | 1137 |
| METSMITS96A | METSMITS96A_1698 | 1138 |
| METSMITS96A | METSMITS96A_1699 | 1139 |
| METSMITS96A | METSMITS96A_1779 | 1140 |
| METSMITS96A | METSMITS96A_1798 | 1141 |
| METSMITS96A | METSMITS96A_1802 | 1142 |
| METSMITS96A | METSMITS96A_1845 | 1143 |
| METSMITS96A | METSMITS96A_1852 | 1144 |
| METSMITS96B | METSMITS96B_0027 | 1145 |
| METSMITS96B | METSMITS96B_0032 | 1146 |
| METSMITS96B | METSMITS96B_0066 | 1147 |
| METSMITS96B | METSMITS96B_0148 | 1148 |
| METSMITS96B | METSMITS96B_0149 | 1149 |
| METSMITS96B | METSMITS96B_0213 | 1150 |
| METSMITS96B | METSMITS96B_0260 | 1151 |
| METSMITS96B | METSMITS96B_0262 | 1152 |
| METSMITS96B | METSMITS96B_0306 | 1153 |
| METSMITS96B | METSMITS96B_0317 | 1154 |
| METSMITS96B | METSMITS96B_0328 | 1155 |
| METSMITS96B | METSMITS96B_0420 | 1156 |
| METSMITS96B | METSMITS96B_0466 | 1157 |
| METSMITS96B | METSMITS96B_0467 | 1158 |
| METSMITS96B | METSMITS96B_0811 | 1159 |
| METSMITS96B | METSMITS96B_0853 | 1160 |
| METSMITS96B | METSMITS96B_0887 | 1161 |
| METSMITS96B | METSMITS96B_0888 | 1162 |
| METSMITS96B | METSMITS96B_0924 | 1163 |
| METSMITS96B | METSMITS96B_0963 | 1164 |
| METSMITS96B | METSMITS96B_1049 | 1165 |
| METSMITS96B | METSMITS96B_1081 | 1166 |
| METSMITS96B | METSMITS96B_1082 | 1167 |
| METSMITS96B | METSMITS96B_1083 | 1168 |
| METSMITS96B | METSMITS96B_1084 | 1169 |
| METSMITS96B | METSMITS96B_1114 | 1170 |
| METSMITS96B | METSMITS96B_1145 | 1171 |
| METSMITS96B | METSMITS96B_1149 | 1172 |
| METSMITS96B | METSMITS96B_1303 | 1173 |
| METSMITS96B | METSMITS96B_1304 | 1174 |
| METSMITS96B | METSMITS96B_1315 | 1175 |
| METSMITS96B | METSMITS96B_1317 | 1176 |
| METSMITS96B | METSMITS96B_1318 | 1177 |
| METSMITS96B | METSMITS96B_1429 | 1178 |
| METSMITS96B | METSMITS96B_1505 | 1179 |
| METSMITS96B | METSMITS96B_1517 | 1180 |
| METSMITS96B | METSMITS96B_1534 | 1181 |
| METSMITS96B | METSMITS96B_1535 | 1182 |
| METSMITS96B | METSMITS96B_1536 | 1183 |
| METSMITS96B | METSMITS96B_1537 | 1184 |
| METSMITS96B | METSMITS96B_1539 | 1185 |
| METSMITS96B | METSMITS96B_1614 | 1186 |
| METSMITS96B | METSMITS96B_1633 | 1187 |
| METSMITS96B | METSMITS96B_1637 | 1188 |
| METSMITS96B | METSMITS96B_1709 | 1189 |
| METSMITS96B | METSMITS96B_1710 | 1190 |
| METSMITS96B | METSMITS96B_1711 | 1191 |
| METSMITS96B | METSMITS96B_1712 | 1192 |
| METSMITS96B | METSMITS96B_1716 | 1193 |
| METSMITS96B | METSMITS96B_1723 | 1194 |
| METSMITS96C | METSMITS96C_0022 | 1195 |
| METSMITS96C | METSMITS96C_0042 | 1196 |
| METSMITS96C | METSMITS96C_0043 | 1197 |
| METSMITS96C | METSMITS96C_0044 | 1198 |
| METSMITS96C | METSMITS96C_0084 | 1199 |
| METSMITS96C | METSMITS96C_0204 | 1200 |
| METSMITS96C | METSMITS96C_0206 | 1201 |
| METSMITS96C | METSMITS96C_0216 | 1202 |
| METSMITS96C | METSMITS96C_0253 | 1203 |
| METSMITS96C | METSMITS96C_0254 | 1204 |
| METSMITS96C | METSMITS96C_0255 | 1205 |
| METSMITS96C | METSMITS96C_0273 | 1206 |
| METSMITS96C | METSMITS96C_0275 | 1207 |
| METSMITS96C | METSMITS96C_0418 | 1208 |
| METSMITS96C | METSMITS96C_0420 | 1209 |
| METSMITS96C | METSMITS96C_0581 | 1210 |
| METSMITS96C | METSMITS96C_0782 | 1211 |
| METSMITS96C | METSMITS96C_0878 | 1212 |
| METSMITS96C | METSMITS96C_0879 | 1213 |
| METSMITS96C | METSMITS96C_0911 | 1214 |
| METSMITS96C | METSMITS96C_0918 | 1215 |
| METSMITS96C | METSMITS96C_0955 | 1216 |
| METSMITS96C | METSMITS96C_0995 | 1217 |
| METSMITS96C | METSMITS96C_1123 | 1218 |
| METSMITS96C | METSMITS96C_1126 | 1219 |
| METSMITS96C | METSMITS96C_1145 | 1220 |
| METSMITS96C | METSMITS96C_1265 | 1221 |
| METSMITS96C | METSMITS96C_1266 | 1222 |
| METSMITS96C | METSMITS96C_1268 | 1223 |
| METSMITS96C | METSMITS96C_1287 | 1224 |
| METSMITS96C | METSMITS96C_1299 | 1225 |
| METSMITS96C | METSMITS96C_1323 | 1226 |
| METSMITS96C | METSMITS96C_1324 | 1227 |
| METSMITS96C | METSMITS96C_1366 | 1228 |
| METSMITS96C | METSMITS96C_1432 | 1229 |
| METSMITS96C | METSMITS96C_1491 | 1230 |
| METSMITS96C | METSMITS96C_1512 | 1231 |
| METSMITS96C | METSMITS96C_1631 | 1232 |
| METSMITS96C | METSMITS96C_1632 | 1233 |
| METSMITS96C | METSMITS96C_1723 | 1234 |
| METSMITS96C | METSMITS96C_1724 | 1235 |
| METSMITS96C | METSMITS96C_1725 | 1236 |
| METSMITS96C | METSMITS96C_1762 | 1237 |
| ATCC 35061 | ref\|NC_009515.1\|: c209454-204964 | 1273 |
| ATCC 35061 | ref\|NC_009515.1\|: c748934-745596 | 1282 |
| ATCC 35061 | ref\|NC_009515.1\|: c885328-884720 | 1285 |

TABLE 1
General features of the M. smithii genome compared to other sequenced Methanobacteriales

| | Methanobrevibacter | Methanosphaera | Methanothermobacter |
|---|---|---|---|
| | smithii | stadtmanae | thermoautotrophicus |
| Genome Size (bp) | 1,853,160 | 1,767,403 | 1,751,377 |
| G + C content (%) | 31 | 28 | 50 |
| Coding Regions (%) | 90 | 84 | 90 |
| Number of ORFs | 1795 | 1534 | 1869 |
| rRNA operons | 2 | 4 | 2 |
| tRNA genes | 34 | 40 | 39 |
| tRNA genes with intron | 1 | 1 | 3 |
| Transposases (remnants) | 2 (20) | 1 (2) | 0 |
| Insertion Sequences | 8 | 4 | 0 |
| Restriction Modification System | 2/6/1 | 3/2/1 | 3/0/0 |
| Subunits (Type I/II/III) | | | |
| Putative Prophage | Yes | No | No |

TABLE 2
Predicted proteome of M. smithii strain PS and conservation among other strains
and in the fecal microbiome of two healthy adults.

[chemical structure]

[chemical structure]

[chemical structure]

[chemical structure]

[chemical structure]

[chemical structure]

[chemical structure]

[chemical structure]

[chemical structure]

[chemical structure]

[chemical structure]

[chemical structure]

[chemical structure]

[chemical structure]

[chemical structure]

[chemical structure]

[chemical structure]

[chemical structure]

[chemical structure]

[chemical structure]

[chemical structure]

[chemical structure]

[chemical structure]

[chemical structure]

[chemical structure]

[chemical structure]

[chemical structure]

[chemical structure]

[chemical structure]

[chemical structure]

[chemical structure]

[chemical structure]

[chemical structure]

[chemical structure]

[chemical structure]

[chemical structure]

[chemical structure]

[chemical structure]

[chemical structure]

[chemical structure]

[chemical structure]

[chemical structure]

[chemical structure]

[chemical structure]

[chemical structure]

[chemical structure]

[chemical structure]

[chemical structure]

[chemical structure]

[chemical structure]

[chemical structure]

[chemical structure]

[chemical structure]

[chemical structure]

[chemical structure]

[chemical structure]

[chemical structure]

[chemical structure]

[chemical structure]

[chemical structure]

[chemical structure]

[chemical structure]

[chemical structure]

[chemical structure]

[chemical structure]

[chemical structure]

[chemical structure]

[chemical structure]

[chemical structure]

[chemical structure]

[chemical structure]

[chemical structure]

[chemical structure]

[chemical structure]

[chemical structure]

[chemical structure]

[chemical structure]

[chemical structure]

¹GeneChip-based genotyping of M. smithii strains done in duplicate; ‘present’ or ‘absent’ calls were determined using a perfect match/mismatch (PM/MM) model in dChip (see Methods). Note that the term ‘absent’ is based on different criteria than those used for the human microbiome dataset (see footnote 2).
²Metagenomic datasets from the microbiomes of two healthy lean adults (Gill et al., 2006) were tested for identity of M. smithii PS ORTs; ORFs with reads that matched with >95% identity are called ‘present,’ 80-95% identity are called ‘divergent’, and <80% identity are called ‘absent’.
ⁱⁱProbeset for M. smithii gene not represented on GeneChip.

TABLE 3
Transcriptional regulators identified in the M. smithii proteome
ORF COG ANNOTATION

| | | |
|---|---|---|
| MSM0026 | COG1396 | predicted transcriptional regulator (possible epoxidase activity) |
| MSM0094 | | predicted transcription regulator (TetR family) |
| MSM0155 | COG2061 | predicted allosteric regulator of homoserine dehydrogenase |
| MSM0218 | COG1321 | iron dependent transcriptional regulator (Fe2+-binding) |
| MSM0233 | COG0347 | nitrogen regulatory protein P-II, GlnK |
| MSM0255 | | putative transcription regulator (winged helix DNA-binding domain) |
| MSM0269 | COG2522 | predicted transcriptional regulator (lambda repressor-like) |
| MSM0329 | COG1396 | DNA binding protein, xenobiotic response element family |
| MSM0354 | COG1222 | ATP-dependent 26S proteasome regulatory subunit, RPT1 |
| MSM0364 | COG0864 | transcriptional regulator (nickel-responsive), NikR |
| MSM0383 | COG1409 | predicted phosphohydrolase, calcineurin-like superfamily |
| MSM0388 | COG4747 | amino acid regulator (ACT domain) |
| MSM0404 | COG4742 | predicted transcriptional regulator |
| MSM0413 | COG1846 | transcriptional regulator, MarR family |
| MSM0417 | COG4068 | predicted transmembrane protein with a zinc ribbon DNA-binding domain |
| MSM0452 | | predicted DNA-binding protein |
| MSM0453 | COG1395 | predicted transcriptional regulator |
| MSM0540 | COG2865 | predicted transcriptional regulator |
| MSM0564 | COG0704 | phosphate uptake regulator, PhoU |
| MSM0569 | COG0704 | phosphate transport system regulator related protein, PhoU |
| MSM0600 | COG1846 | transcriptional regulator, MarR family |
| MSM0635 | COG2150 | predicted regulator of amino acid metabolism |
| MSM0650 | COG1309 | transcriptional regulator, TetR/AcrR family |
| MSM0766 | COG0340 | biotin-[acetyl-CoA-carboxylase] ligase/biotin operon regulator bifunctional protein, BirA |
| MSM0775 | COG2207 | transcriptional regulator, AraC family |
| MSM0817 | COG4742 | predicted transcriptional regulator |
| MSM0818 | COG4742 | predicted transcriptional regulator |
| MSM0819 | COG0640 | putative transcription regulator, ArsR family (winged helix DNA-binding domain) |
| MSM0851 | COG1548 | predicted transcriptional regulator |
| MSM0862 | COG1781 | aspartate carbamoyltransferase regulatory chain, PyrI |
| MSM0864 | COG1733 | predicted transcriptional regulator |
| MSM0936 | COG0603 | transcription regulator-related ATPase, ExsB |
| MSM0966 | COG1223 | predicted 26S protease regulatory subunit (ATP-dependent), AAA+ family ATPase |
| MSM1030 | COG0399 | predicted pyridoxal phosphate-dependent enzyme |
| MSM1032 | COG1522 | transcriptional regulator, Lrp family |
| MSM1081 | COG1112 | transcriptional regulator, DNA2/NAM7 helicase family |
| MSM1090 | COG1489 | sugar fermentation stimulation protein, SfsA |
| MSM1106 | COG0068 | hydrogenase maturation factor, HypF |
| MSM1107 | COG1777 | predicted transcriptional regulator |
| MSM1126 | COG0640 | predicted transcriptional regulator, ArsR family (arsenic) |
| MSM1150 | COG1476 | predicted transcriptional regulator |
| MSM1207 | COG2005 | molybdate transport system regulatory protein |
| MSM1224 | COG0440 | acetolactate synthase, small subunit (regulatory), IlvH |
| MSM1230 | COG1846 | transcriptional regulator, MarR family |
| MSM1250 | COG1695 | predicted transcriptional regulator, PadR-like family |
| MSM1257 | COG1339 | predicted transcriptional regulator of riboflavin/FAD biosynthetic operon |
| MSM1292 | COG2183 | transcriptional accessory protein, S1 RNA binding family, Tex |
| MSM1315 | COG2865 | predicted transcriptional regulator |
| MSM1350 | COG0640 | predicted transcriptional regulator, ArsR family |
| MSM1390 | COG0583 | transcriptional regulator, LysR family |
| MSM1445 | COG1378 | predicted transcriptional regulator |
| MSM1499 | COG1497 | predicted transcriptional regulator |
| MSM1528 | COG1396 | predicted transcriptional regulator, HTH XRE-like family (xenobiotic) |
| MSM1536 | COG0399 | pleiotropic regulatory protein DegT (PLP-dependent) |
| MSM1568 | | putative transcription regulator |
| MSM1606 | COG0641 | arylsulfatase regulator, AslB |
| MSM1614 | COG2524 | predicted transcriptional regulator |
| MSM1713 | COG4747 | predicted regulatory protein, amino acid-binding ACT domain family |
| MSM1737 | | putative transcription regulator |
| MSM1777 | | putative transcription regulator |

TABLE 4
Machinery for genome evolution in M. smithii
ORF ANNOTATION

| | | |
|---|---|---|
| Restriction | MSM0157 | predicted type I restriction-modification enzyme, subunit S |
| Modification | MSM0158 | type I restriction-modification system methylase, subunit S |
| System | MSM1187 | predicted type III restriction enzyme |
| Subunits | MSM1217 | type II restriction endonuclease |
| | MSM1743 | predicted type II restriction enzyme, methylase subunit |
| | MSM1744 | predicted type II restriction enzyme, methylase subunit |
| | MSM1745 | predicted type II restriction enzyme, methylase subunit |
| | MSM1746 | predicted type II restriction enzyme, methylase subunit |
| | MSM1747 | predicted type II restriction enzyme, methylase subunit |
| | MSM1748 | predicted type II restriction enzyme, methylase subunit |
| | MSM1752 | predicted restriction endonuclease |
| Recombination/ | MSM0023 | uncharacterized protein predicted to be involved in DNA repair |
| Repair | MSM0097 | Mg-dependent DNase, TatD |
| | MSM0120 | purine NTPase involved in DNA repair, Rad50 |
| | MSM0121 | DNA repair exonuclease (SbcD/Mre11-family), Rad32 |
| | MSM0163 | conserved hypothetical proetin predicted to be involved in DNA repair |
| | MSM0164 | conserved hypothetical protein predicted to be involved in DNA repair |
| | MSM0167 | conserved hypothetical protein predicted to be involved in DNA repair |
| | MSM0168 | conserved hypothetical protein predicted to be involved in DNA repair |
| | MSM0170 | conserved hypothetical protein predicted to be involved in DNA repair |
| | MSM0405 | predicted metal-dependent DNase, TatD-related family |
| | MSM0416 | Mg-dependent DNase, TatD-related |
| | MSM0524 | DNA mismatch repair ATPase, MutS |
| | MSM0543 | DNA repair photolyase, SplB |
| | MSM0611 | DNA repair protein, RadB |
| | MSM0693 | ATPase involved in DNA repair, SbcC |
| | MSM0695 | DNA repair helicase |
| | MSM0725 | DNA repair flap structure-specific 5′-3′ endonuclease |
| | MSM1193 | single-stranded DNA-specific exonuclease, DHH family |
| | MSM1333 | DNA repair protein RadA, RadA |
| | MSM1500 | ssDNA exonuclease, RecJ |
| | MSM1640 | DNA intergrase/recombinase, phage integrase family |
| | MSM1761 | predicted ATPase involved in DNA repair |
| IS elements | MSM0527 | IS element ISM1 (ICSNY family) |
| | MSM0528 | IS element ISM1 (ICSNY family) |
| | MSM0532 | IS element ISM1 (ICSNY family) |
| | MSM0533 | IS element ISM1 (ICSNY family) |
| | MSM0534 | IS element ISM1 (ICSNY family) |
| | MSM1518 | IS element ISM1 (ICSNY family) |
| | MSM1519 | IS element ISM1 (ICSNY family) |
| | MSM1520 | IS element ISM1 (ICSNY family) |
| Transposases | MSM0008 | putative transposase |
| or | | |
| remnants of | MSM0087 | putative transposase |
| transposases | MSM0110 | predicted transposase |
| | MSM0230 | putative transposase |
| | MSM0256 | putative transposase |
| | MSM0342 | putative transposase |
| | MSM0396 | putative transposase |
| | MSM0458 | transposase, homeodomain-like superfamily |
| | MSM0460 | predicted transposase |
| | MSM0601 | putative transposase |
| | MSM0629 | putative transposase |
| | MSM0730 | putative transposase |
| | MSM0871 | putative transposase |
| | MSM1093 | putative transposase |
| | MSM1115 | putative transposase |
| | MSM1189 | putative transposase |
| | MSM1419 | putative transposase |
| | MSM1523 | transposase |
| | MSM1566 | putative transposase |
| | MSM1588 | predicted transposase |
| | MSM1589 | predicted transposase, RNaseH-like family |
| | MSM1596 | putative transposase |

TABLE 5
Publicly available finished genome sequences for members of Archaea

| | | | | | GenBank |
|---|---|---|---|---|---|
| | | | | Habitat of | Accession |
| Group | Strain Designation | Abbr. | Temp. | Origin | Number |
| Human Gut | Methanobrevibacter smithii PS (ATCC 35021) | Msm | Mesophilic | Host-associated | CP000678 |
| Methanogens | Methanosphaera stadtmanae DSM 3091 | Msp | Mesophilic | Host-associated | CP000102 |
| Non-Gut | Methanothermobacter thermautotrophicus | Mth | Thermophilic | Specialized | AE000666 |
| | Delta H | | | | |
| Methanogens | Methanocaldococcus jannaschii DSM 2661 | Mja | Hyperthermophilic | Aquatic | L77117 |
| | Methanococcoides burtonii DSM 6242 | Mbu | Mesophilic | Aquatic | CP000300 |
| | Methanococcus maripaludis S2 | Mmr | Mesophilic | Aquatic | BX950229 |
| | Methanopyrus kandleri AV19 | Mka | Hyperthermophilic | Specialized | AE009439 |
| | Methanosarcina acetivorans C2A | Mac | Mesophilic | Aquatic | AE010299 |
| | Methanosarcina barkeri str. Fusaro | Mba | Mesophilic | Multiple | CP000099 |
| | Methanosarcina mazei Go1 | Mma | Mesophilic | Multiple | AE008384 |
| | Methanospirillum hungatei JF-1 | Mhu | Mesophilic | Multiple | CP000254 |
| Other Archaea | Aeropyrum pernix K1 | Apx | Hyperthermophilic | Specialized | BA000002 |
| | Archaeoglobus fulgidus DSM 4304 | Afu | Hyperthermophilic | Aquatic | AE000782 |
| | Haloarcula marismortui ATCC 43049 | Hma | Mesophilic | Aquatic | AY596297 |
| | Halobacterium sp. NRC-1 | Hal | Mesophilic | Specialized | AE004437 |
| | Nanoarchaeum equitans Kin4-M | Neq | Hyperthermophilic | Host-associated | AE017199 |
| | Natronomonas pharaonis DSM 2160 | Nph | Mesophilic | Aquatic | CR936257 |
| | Picrophilus torridus DSM 9790 | Pto | Thermophilic | Specialized | AE017261 |
| | Pyrobaculum aerophilum str. IM2 | Pae | Hyperthermophilic | Aquatic | AE009441 |
| | Pyrococcus abyssi GE5 | Pab | Hyperthermophilic | Aquatic | AL096836 |
| | Pyrococcus furiosus DSM 3638 | Pfu | Hyperthermophilic | Aquatic | AE009950 |
| | Pyrococcus horikoshii OT3 | Pho | Hyperthermophilic | Aquatic | BA000001 |
| | Sulfolobus acidocaldarius DSM 639 | Sac | Thermophilic | Specialized | CP000077 |
| | Sulfolobus solfataricus P2 | Sso | Hyperthermophilic | Specialized | AE006641 |
| | Sulfolobus tokodaii str. 7 | Sto | Hyperthermophilic | Specialized | BA000023 |
| | Thermococcus kodakarensis KOD1 | Tko | Hyperthermophilic | Specialized | AP006878 |
| | Thermoplasma acidophilum DSM 1728 | Tac | Thermophilic | Specialized | AL139299 |
| | Thermoplasma volcanium GSS1 | Tvo | Thermophilic | Specialized | BA000011 |

TABLE 6
Representation of enriched gene ontology (GO) categories in the
M. smithii and M. stadtmanae proteomes compared to the
proteomes of all sequenced methanogenic archaea and all archaea

[chemical structure]

[chemical structure]

Abbreviations: ‘non-gut-associated methanogens’ (Meth) or ‘all Archaea’ (Arch) [see SI Table 5]; No., number of genes associated with gene ontology (GO)

TABLE 7
M. smithii genes in the significantly enriched GO categories listed in Table 6

[chemical structure]

[chemical structure]

[chemical structure]

[chemical structure]

[chemical structure]

[chemical structure]

[chemical structure]

[chemical structure]

[chemical structure]

[chemical structure]

[chemical structure]

[chemical structure]

[chemical structure]

[chemical structure]

TABLE 8
M. smithii proteins with homologs in other sequenced Methanobacteriales

| | | | | Methanothermobacter | | |
|---|---|---|---|---|---|---|
| M. smithii | Methanosphaera stadtmanae | | | thermoautotrophicus | | |
| ORF | ORF | ANNOTATION | E-value | ORF | ANNOTATION | E-value |
| MSM0001 | Msp_0220 | predicted glycosyltransferase | 4.2E−08 | NONE | | |
| MSM0002 | Msp_1355 | predicted site-specific | 2.0E−08 | MTH_893 | integrase-recombinase | 8.1E−16 |
| | | recombinase/integrase | | | protein | |
| MSM0003 | Msp_0548 | hypothetical membrane-spanning | 6.8E−09 | NONE | | |
| | | protein | | | | |
| MSM0004 | Msp_0803 | conserved hypothetical protein | 2.3E−24 | NONE | | |
| MSM0005 | Msp_0783 | hypothetical membrane-spanning | 3.7E−05 | MTH_1439 | unknown | 6.2E−04 |
| | | protein | | | | |
| MSM0006 | Msp_0725 | hypothetical protein | 1.3E−05 | MTH_1277 | unknown | 3.3E−05 |
| MSM0007 | NONE | | | MTH_675 | unknown | 1.1E−34 |
| MSM0008 | Msp_0017 | conserved hypothetical protein | 1.7E−28 | NONE | | |
| MSM0009 | NONE | | | MTH_675 | unknown | 8.1E−34 |
| MSM0010 | Msp_0813 | conserved hypothetical protein | 1.5E−36 | MTH_676 | unknown | 1.7E−40 |
| MSM0011 | NONE | | | NONE | | |
| MSM0012 | Msp_0317 | hypothetical protein | 3.3E−04 | NONE | | |
| MSM0013 | NONE | | | NONE | | |
| MSM0014 | NONE | | | MTH_1289 | heat shock protein GrpE | 2.6E−04 |
| MSM0015 | NONE | | | NONE | | |
| MSM0016 | NONE | | | NONE | | |
| MSM0017 | NONE | | | NONE | | |
| MSM0018 | NONE | | | NONE | | |
| MSM0019 | NONE | | | NONE | | |
| MSM0020 | Msp_1323 | conserved hypothetical protein | 1.4E−05 | MTH_83 | O-linked GlcNAc | 3.3E−07 |
| | | | | | transferase | |
| MSM0021 | Msp_0047 | predicted short chain | 3.7E−40 | NONE | | |
| | | dehydrogenase | | | | |
| MSM0022 | NONE | | | NONE | | |
| MSM0023 | Msp_0424 | conserved hypothetical protein | 1.6E−25 | MTH_1084 | conserved protein | 4.4E−18 |
| MSM0024 | NONE | | | NONE | | |
| MSM0025 | Msp_0447 | predicted acyl-CoA synthetase | 3.7E−49 | MTH_657 | long-chain-fatty-acid-CoA | 8.7E−227 |
| | | | | | ligase | |
| MSM0026 | Msp_0265 | conserved hypothetical protein | 2.0E−16 | MTH_659 | epoxidase | 4.1E−62 |
| MSM0027 | Msp_0667 | putative glutamate synthase, | 7.9E−70 | NONE | glutamate synthase | 4.6E−79 |
| | | subunit 2 with ferredoxin domain | | | (NADPH), alpha subunit | |
| MSM0028 | Msp_0602 | conserved hypothetical protein | 1.9E−13 | MTH_1876 | conserved protein | 1.7E−04 |
| MSM0029 | NONE | | | NONE | | |
| MSM0030 | Msp_0741 | conserved hypothetical | 1.8E−72 | MTH_1812 | conserved protein | 1.6E−44 |
| | | membrane-spanning protein | | | | |
| MSM0031 | Msp_1465 | member of asn/thr-rich large | 2.9E−23 | MTH_716 | cell surface glycoprotein | 3.7E−04 |
| | | protein family | | | (s-layer protein) | |
| MSM0032 | NONE | | | NONE | | |
| MSM0033 | Msp_0966 | putative 2-dehydropantoate 2- | 6.8E−112 | NONE | | |
| | | reductase | | | | |
| MSM0034 | Msp_0725 | hypothetical protein | 7.9E−06 | NONE | | |
| MSM0035 | NONE | | | NONE | | |
| MSM0036 | NONE | | | NONE | | |
| MSM0037 | NONE | | | NONE | | |
| MSM0038 | NONE | | | NONE | | |
| MSM0039 | NONE | | | NONE | | |
| MSM0040 | Msp_1274 | conserved hypothetical protein | 5.5E−05 | NONE | | |
| MSM0041 | NONE | | | NONE | | |
| MSM0042 | NONE | | | NONE | | |
| MSM0043 | Msp_0737 | putative peptide methionine | 1.6E−32 | MTH_535 | peptide methionine | 5.3E−16 |
| | | sulfoxide reductase MsrA/MsrB | | | sulfoxide reductase | |
| MSM0044 | Msp_0510 | putative aspartate | 2.0E−15 | MTH_1894 | aspartate | 3.9E−13 |
| | | aminotransferase | | | aminotransferase | |
| | | | | | homolog | |
| MSM0045 | Msp_0283 | predicted ATPase | 3.9E−93 | MTH_1176 | nucleotide-binding protein | 1.4E−70 |
| | | | | | (putative ATPase) | |
| MSM0046 | Msp_1460 | predicted NAD(FAD)-dependent | 8.4E−114 | MTH_1354 | NADH oxidase | 2.0E−149 |
| | | dehydrogenase | | | | |
| MSM0047 | NONE | | | NONE | | |
| MSM0048 | Msp_0701 | hypothetical protein | 4.0E−20 | NONE | | |
| MSM0049 | Msp_0665 | F420H2:NADP oxidoreductase | 3.1E−75 | MTH_248 | conserved protein | 9.4E−56 |
| MSM0050 | Msp_1172 | conserved hypothetical protein | 1.7E−21 | NONE | | |
| MSM0051 | Msp_1399 | member of asn/thr-rich large | 4.0E−33 | MTH_716 | cell surface glycoprotein | 3.9E−11 |
| | | protein family | | | (s-layer protein) | |
| MSM0052 | Msp_0145 | member of asn/thr-rich large | 1.4E−53 | MTH_716 | cell surface glycoprotein | 1.8E−11 |
| | | protein family | | | (s-layer protein) | |
| MSM0053 | Msp_0086 | putative tRNA | 5.0E−100 | MTH_584 | tRNA | 2.5E−110 |
| | | nucleotidyltransferase | | | nucleotidyltransferase | |
| MSM0054 | Msp_0089 | predicted 2′-5′ RNA ligase | 7.2E−37 | MTH_583 | conserved protein | 9.1E−42 |
| MSM0055 | Msp_0090 | predicted 3-dehydroquinate | 3.5E−108 | MTH_580 | conserved protein | 3.3E−124 |
| | | synthase | | | | |
| MSM0056 | Msp_0091 | predicted fructose-bisphosphate | 1.5E−100 | MTH_579 | conserved protein | 2.9E−100 |
| | | aldolase | | | | |
| MSM0057 | Msp_0762 | member of asn/thr-rich large | 1.7E−13 | MTH_716 | cell surface glycoprotein | 8.2E−07 |
| | | protein family | | | (s-layer protein) | |
| MSM0058 | Msp_0128 | predicted helicase | 8.6E−23 | MTH_472 | DNA helicase II | 1.2E−90 |
| MSM0059 | Msp_0092 | conserved hypothetical protein | 9.4E−35 | MTH_578 | unknown | 2.1E−49 |
| MSM0060 | Msp_1187 | predicted archaeal kinase | 8.2E−52 | MTH_577 | conserved protein | 2.1E−49 |
| MSM0061 | Msp_0757 | predicted ATPase | 7.5E−97 | NONE | | |
| MSM0062 | Msp_0554 | hypothetical protein | 2.2E−08 | MTH_847 | unknown | 6.9E−08 |
| MSM0063 | Msp_1186 | predicted hydrolase | 1.3E−67 | MTH_576 | conserved protein | 7.0E−51 |
| MSM0064 | Msp_0099 | conserved hypothetical protein | 4.6E−10 | MTH_812 | conserved protein | 1.5E−09 |
| MSM0065 | Msp_1185 | putative 5-amino-6-(5- | 2.6E−55 | MTH_235 | riboflavin-specific | 1.5E−66 |
| | | phosphoribosylamino)uracil | | | deaminase | |
| | | reductase | | | | |
| MSM0066 | Msp_0080 | predicted glycosyltransferase | 8.2E−107 | MTH_590 | N-acetylglucosamine-1- | 7.9E−107 |
| | | | | | phosphate transferase | |
| MSM0067 | NONE | | | NONE | | |
| MSM0068 | Msp_0407 | conserved hypothetical protein | 6.0E−04 | MTH_521 | unknown | 8.4E−04 |
| MSM0069 | Msp_0081 | conserved hypothetical protein | 2.8E−26 | MTH_589 | conserved protein | 3.1E−25 |
| MSM0070 | Msp_0082 | conserved hypothetical protein | 2.8E−99 | MTH_588 | conserved protein | 4.8E−100 |
| MSM0071 | Msp_0083 | MetG | 5.3E−199 | MTH_587 | methionyl-tRNA | 2.9E−235 |
| | | | | | synthetase | |
| MSM0072 | Msp_0216 | hypothetical membrane-spanning | 2.2E−04 | NONE | | |
| | | protein | | | | |
| MSM0073 | Msp_0084 | DNA primase, large subunit | 1.4E−102 | MTH_586 | unknown | 1.7E−118 |
| MSM0074 | NONE | | | NONE | | |
| MSM0075 | Msp_0085 | DNA primase, small subunit | 1.2E−96 | NONE | DNA primase, small | 8.1E−105 |
| | | | | | subunit | |
| MSM0076 | Msp_0710 | hypothetical protein | 9.9E−04 | NONE | | |
| MSM0077 | Msp_0357 | putative thymidylate kinase | 6.9E−16 | MTH_1100 | conserved protein | 4.6E−47 |
| MSM0078 | NONE | | | MTH_1099 | conserved protein | 3.9E−50 |
| MSM0079 | Msp_0392 | CofH | 7.6E−81 | MTH_820 | conserved protein | 1.0E−106 |
| MSM0080 | Msp_0278 | ComD | 1.0E−53 | MTH_1206 | phosphonopyruvate | 1.7E−47 |
| | | | | | decarboxylase related | |
| | | | | | protein | |
| MSM0081 | Msp_0277 | ComE | 9.4E−51 | MTH_1207 | phosphonopyruvate | 1.7E−40 |
| | | | | | decarboxylase related | |
| | | | | | protein | |
| MSM0082 | Msp_0127 | HdrA2 | 1.3E−241 | NONE | heterodisulfide reductase, | 2.5E−133 |
| | | | | | subunit A | |
| MSM0083 | Msp_0126 | HdrB2 | 2.6E−94 | NONE | heterodisulfide reductase, | 8.6E−46 |
| | | | | | subunit B | |
| MSM0084 | Msp_0125 | HdrC2 | 2.6E−48 | NONE | heterodisulfide reductase, | 3.5E−17 |
| | | | | | subunit C | |
| MSM0085 | Msp_1261 | conserved hypothetical protein | 6.6E−114 | MTH_1684 | conserved protein | 2.1E−115 |
| | | | | | (contains ferredoxin | |
| | | | | | domain) | |
| MSM0086 | Msp_1270 | ComA | 5.2E−73 | MTH_1674 | conserved protein | 3.5E−81 |
| MSM0087 | Msp_0233 | conserved hypothetical protein | 2.3E−22 | NONE | | |
| MSM0088 | Msp_1322 | conserved hypothetical protein | 7.3E−44 | MTH_727 | conserved protein | 1.6E−51 |
| MSM0089 | Msp_1314 | ProC | 8.2E−07 | NONE | | |
| MSM0090 | NONE | | | MTH_224 | conserved protein | 8.6E−30 |
| MSM0091 | Msp_0129 | putative 2,3-diphosphoglycerate | 8.6E−144 | MTH_223 | unknown | 2.0E−172 |
| | | synthase | | | | |
| MSM0092 | Msp_0154 | member of asn/thr-rich large | 5.6E−08 | NONE | | |
| | | protein family | | | | |
| MSM0093 | Msp_1068 | partially conserved hypothetical | 1.1E−58 | MTH_1858 | phage infection protein | 5.7E−98 |
| | | membrane-spanning protein | | | homolog | |
| MSM0094 | Msp_0971 | hypothetical protein | 4.4E−09 | MTH_1787 | conserved protein | 9.3E−17 |
| MSM0095 | Msp_1181 | predicted phosphotransacetylase | 1.3E−44 | MTH_231 | conserved protein | 8.8E−44 |
| MSM0096 | Msp_1182 | UppS | 2.6E−96 | MTH_232 | conserved protein | 2.3E−100 |
| MSM0097 | Msp_1183 | predicted DNase | 3.2E−57 | MTH_233 | conserved protein | 3.4E−67 |
| MSM0098 | NONE | | | NONE | | |
| MSM0099 | Msp_0079 | hypothetical membrane-spanning | 2.1E−23 | MTH_596 | unknown | 8.2E−25 |
| | | protein | | | | |
| MSM0100 | Msp_0078 | hypothetical membrane-spanning | 7.3E−12 | MTH_429 | unknown | 1.1E−13 |
| | | protein | | | | |
| MSM0101 | Msp_0988 | CbiF | 9.8E−88 | MTH_602 | precorrin-3 methylase | 1.5E−80 |
| MSM0102 | Msp_1236 | MetE | 3.4E−69 | MTH_775 | cobalamin-independent | 3.8E−75 |
| | | | | | methionine synthase | |
| MSM0103 | NONE | | | MTH_776 | conserved protein | 7.3E−33 |
| MSM0104 | NONE | | | MTH_777 | conserved protein | 2.7E−42 |
| MSM0105 | Msp_1234 | conserved hypothetical | 3.8E−86 | MTH_778 | unknown | 5.9E−118 |
| | | membrane-spanning protein | | | | |
| MSM0106 | Msp_1232 | conserved hypothetical protein | 1.8E−109 | MTH_781 | conserved protein | 2.3E−132 |
| MSM0107 | Msp_1231 | HypB | 1.4E−79 | MTH_782 | hydrogenase | 1.1E−84 |
| | | | | | expression/formation | |
| | | | | | protein HypB | |
| MSM0108 | Msp_1230 | HypA | 5.8E−35 | MTH_783 | hydrogenase | 4.8E−36 |
| | | | | | expression/formation | |
| | | | | | protein HypA | |
| MSM0109 | Msp_0987 | hypothetical membrane-spanning | 8.6E−09 | NONE | | |
| | | protein | | | | |
| MSM0110 | Msp_0017 | conserved hypothetical protein | 1.5E−22 | NONE | | |
| MSM0111 | NONE | | | NONE | | |
| MSM0112 | Msp_0367 | predicted helicase | 1.2E−208 | NONE | ATP-dependent RNA | 1.4E−235 |
| | | | | | helicase, eIF-4A family | |
| MSM0113 | Msp_0128 | predicted helicase | 9.9E−137 | MTH_472 | DNA helicase II | 6.1E−26 |
| MSM0114 | NONE | | | NONE | | |
| MSM0115 | Msp_1290 | conserved hypothetical protein | 8.0E−29 | MTH_526 | conserved protein | 2.1E−51 |
| MSM0116 | Msp_1289 | conserved hypothetical protein | 3.5E−51 | MTH_528 | unknown | 9.1E−42 |
| MSM0117 | Msp_1288 | conserved hypothetical | 4.7E−56 | MTH_529 | unknown | 1.5E−66 |
| | | membrane-spanning protein | | | | |
| MSM0118 | Msp_1286 | conserved hypothetical protein | 1.1E−86 | MTH_532 | UDP-N-acetylmuramyl | 2.9E−86 |
| | | | | | tripeptide synthetase | |
| | | | | | related protein | |
| MSM0119 | Msp_0156 | predicted nuclease | 3.2E−18 | MTH_538 | unknown | 2.5E−14 |
| MSM0120 | Msp_1095 | DNA double-strand break repair | 1.3E−92 | MTH_540 | intracellular protein | 2.1E−27 |
| | | protein Rad50 | | | transport protein | |
| MSM0121 | Msp_1094 | DNA double-strand break repair | 3.7E−72 | MTH_541 | Rad32 related protein | 1.2E−16 |
| | | protein Mre11 | | | | |
| MSM0122 | Msp_1093 | predicted ATPase | 1.7E−122 | MTH_307 | conserved protein | 4.2E−124 |
| MSM0123 | Msp_1092 | conserved hypothetical protein | 2.4E−29 | MTH_306 | conserved protein | 1.2E−32 |
| MSM0124 | Msp_1291 | PcrB | 5.1E−75 | MTH_552 | conserved protein | 2.9E−84 |
| MSM0125 | Msp_1292 | 50S ribosomal protein L40e | 5.5E−23 | MTH_553 | ribosomal protein L40 | 7.6E−22 |
| MSM0126 | Msp_1293 | conserved hypothetical protein | 9.4E−51 | MTH_554 | conserved protein | 2.9E−54 |
| MSM0127 | NONE | | | NONE | | |
| MSM0128 | Msp_0853 | conserved hypothetical | 2.3E−10 | MTH_570 | unknown | 2.8E−31 |
| | | membrane-spanning protein | | | | |
| MSM0129 | Msp_0435 | nicotinamide-nucleotide | 8.1E−61 | MTH_150 | conserved protein | 6.7E−62 |
| | | adenylyltransferase | | | | |
| MSM0130 | NONE | | | MTH_149 | molybdenum cofactor | 6.6E−39 |
| | | | | | biosynthesis protein MoaE | |
| MSM0131 | NONE | | | MTH_920 | anion permease | 1.5E−04 |
| MSM0132 | NONE | | | MTH_1797 | conserved protein | 7.9E−20 |
| MSM0133 | Msp_1198 | predicted thioesterase | 2.2E−42 | MTH_658 | unknown | 4.8E−36 |
| MSM0134 | Msp_0565 | predicted M42 glutamyl | 2.2E−115 | NONE | endo-1,4-beta-glucanase | 3.7E−116 |
| | | aminopeptidase | | | | |
| MSM0135 | Msp_0668 | conserved hypothetical protein | 9.1E−85 | NONE | coenzyme F420-reducing | 4.5E−88 |
| | | | | | hydrogenase, beta | |
| | | | | | subunit homolog | |
| MSM0136 | Msp_0147 | ferredoxin | 2.2E−06 | NONE | tungsten | 2.2E−06 |
| | | | | | formylmethanofuran | |
| | | | | | dehydrogenase, subunit G | |
| MSM0137 | Msp_0220 | predicted glycosyltransferase | 3.7E−12 | MTH_540 | intracellular protein | 4.7E−05 |
| | | | | | transport protein | |
| MSM0138 | NONE | | | MTH_491 | conserved protein | 2.6E−51 |
| MSM0139 | Msp_0448 | predicted polysaccharide | 7.6E−04 | NONE | | |
| | | biosynthesis protein | | | | |
| MSM0140 | Msp_0560 | conserved hypothetical protein | 4.0E−59 | MTH_435 | conserved protein | 2.9E−68 |
| MSM0141 | Msp_0561 | predicted dephospho-CoA kinase | 5.5E−23 | MTH_434 | UMP/CMP kinase related | 5.6E−42 |
| | | | | | protein | |
| MSM0142 | Msp_0563 | predicted ATPase of PP-loop | 3.2E−66 | MTH_432 | conserved protein | 2.9E−68 |
| | | superfamily | | | | |
| MSM0143 | Msp_0564 | partially conserved hypothetical | 1.3E−30 | MTH_431 | unknown | 2.4E−34 |
| | | membrane-spanning protein | | | | |
| MSM0144 | NONE | | | NONE | | |
| MSM0145 | Msp_0451 | hypothetical membrane-spanning | 1.9E−13 | MTH_422 | unknown | 1.6E−14 |
| | | protein | | | | |
| MSM0146 | Msp_0452 | conserved hypothetical | 7.0E−18 | MTH_421 | unknown | 2.0E−21 |
| | | membrane-spanning protein | | | | |
| MSM0147 | Msp_0453 | PyrG | 2.2E−202 | MTH_419 | CTP synthase | 2.9E−212 |
| MSM0148 | Msp_0739 | predicted oxidoreductase | 3.9E−93 | MTH_907 | conserved protein | 3.1E−32 |
| MSM0149 | NONE | | | NONE | | |
| MSM0150 | NONE | | | NONE | | |
| MSM0151 | NONE | | | NONE | | |
| MSM0152 | Msp_1417 | predicted Na+-driven multidrug | 1.1E−28 | MTH_314 | conserved protein | 4.7E−23 |
| | | efflux pump | | | | |
| MSM0153 | Msp_0485 | ApgM1 | 1.3E−110 | MTH_418 | phosphonopyruvate | 2.1E−106 |
| | | | | | decarboxylase related | |
| | | | | | protein | |
| MSM0154 | Msp_0487 | putative homoserine | 1.3E−101 | MTH_417 | homoserine | 6.1E−100 |
| | | dehydrogenase | | | dehydrogenase homolog | |
| MSM0155 | Msp_0488 | predicted allosteric regulator of | 1.1E−29 | MTH_416 | conserved protein | 7.8E−36 |
| | | homoserine dehydrogenase | | | | |
| MSM0156 | Msp_0489 | conserved hypothetical protein | 2.6E−23 | MTH_415 | conserved protein | 3.3E−21 |
| MSM0157 | Msp_0484 | predicted type I restriction- | 1.9E−09 | NONE | type I restriction | 5.3E−09 |
| | | modification system subunit | | | modification system, | |
| | | | | | subunit S | |
| MSM0158 | Msp_0483 | hypothetical protein | 2.3E−17 | NONE | type I restriction | 2.2E−13 |
| | | | | | modification system, | |
| | | | | | subunit S | |
| MSM0159 | Msp_0777 | member of asn/thr-rich large | 2.1E−13 | NONE | | |
| | | protein family | | | | |
| MSM0160 | Msp_0490 | putative asparagine synthetase | 7.9E−102 | MTH_414 | asparagine synthetase | 2.3E−91 |
| MSM0161 | NONE | | | NONE | | |
| MSM0162 | NONE | | | NONE | | |
| MSM0163 | Msp_0425 | conserved hypothetical protein | 7.0E−23 | MTH_1083 | conserved protein | 5.6E−26 |
| MSM0164 | Msp_0946 | conserved hypothetical protein | 1.3E−106 | MTH_1084 | conserved protein | 4.6E−118 |
| MSM0165 | Msp_0945 | predicted RecB family | 7.9E−54 | MTH_1085 | conserved protein | 1.8E−45 |
| | | exonuclease | | | | |
| MSM0166 | Msp_0422 | predicted helicase | 2.3E−27 | MTH_1086 | conserved protein | 9.1E−32 |
| MSM0167 | NONE | | | MTH_1087 | unknown | 8.4E−04 |
| MSM0168 | NONE | | | NONE | | |
| MSM0169 | Msp_0220 | predicted glycosyltransferase | 2.1E−04 | NONE | | |
| MSM0170 | Msp_0944 | conserved hypothetical protein | 1.4E−63 | MTH_1091 | conserved protein | 3.4E−35 |
| MSM0171 | Msp_0835 | hypothetical membrane-spanning | 2.7E−43 | MTH_769 | unknown | 1.7E−34 |
| | | protein | | | | |
| MSM0172 | NONE | | | NONE | | |
| MSM0173 | Msp_0145 | member of asn/thr-rich large | 3.2E−34 | MTH_1074 | putative membrane | 5.5E−31 |
| | | protein family | | | protein | |
| MSM0174 | Msp_0677 | predicted O-acetylhomoserine | 1.9E−123 | NONE | | |
| | | sulfhydrylase | | | | |
| MSM0175 | Msp_0676 | MetX | 2.3E−166 | MTH_1820 | homoserine O- | 1.5E−21 |
| | | | | | acetyltransferase | |
| MSM0176 | NONE | | | NONE | | |
| MSM0177 | NONE | | | NONE | | |
| MSM0178 | Msp_1385 | conserved hypothetical protein | 1.5E−27 | NONE | | |
| MSM0179 | NONE | | | NONE | | |
| MSM0180 | NONE | | | MTH_698 | unknown | 1.6E−04 |
| MSM0181 | Msp_1174 | 50S ribosomal protein L37e | 9.6E−26 | MTH_648 | ribosomal protein L37 | 2.8E−24 |
| MSM0182 | Msp_1175 | putative snRNP Sm-like protein | 1.5E−27 | MTH_649 | conserved protein | 2.1E−33 |
| MSM0183 | Msp_1176 | predicted RNA-binding protein | 9.0E−46 | MTH_650 | conserved protein | 8.6E−46 |
| MSM0184 | Msp_1177 | predicted creatinine | 1.3E−51 | MTH_651 | conserved protein | 1.6E−51 |
| | | amidohydrolase | | | | |
| MSM0185 | Msp_0547 | hypothetical membrane-spanning | 7.8E−08 | MTH_515 | unknown | 4.3E−05 |
| | | protein | | | | |
| MSM0186 | Msp_0345 | conserved hypothetical protein | 1.3E−14 | NONE | | |
| MSM0187 | Msp_0444 | rubredoxin | 2.5E−09 | MTH_156 | rubredoxin | 2.3E−13 |
| MSM0188 | Msp_0444 | rubredoxin | 3.4E−14 | MTH_156 | rubredoxin | 3.5E−17 |
| MSM0189 | Msp_1301 | predicted nucleoside- | 4.6E−08 | MTH_272 | acetyl/acyl transferase | 1.3E−58 |
| | | diphosphate-sugar | | | related protein | |
| | | pyrophosphorylase | | | | |
| MSM0190 | Msp_0617 | predicted ATPase | 3.1E−84 | MTH_271 | conserved protein | 1.8E−75 |
| MSM0191 | Msp_1533 | RpoM1 | 1.5E−04 | NONE | | |
| MSM0192 | Msp_0618 | ArgH | 2.7E−147 | MTH_269 | argininosuccinate lyase | 8.2E−160 |
| MSM0193 | Msp_0620 | 30S ribosomal protein S27Ae | 1.8E−17 | MTH_268 | ribosomal protein S27a | 8.1E−18 |
| MSM0194 | Msp_0621 | 30S ribosomal protein S24e | 1.1E−26 | MTH_267 | ribosomal protein S24 | 1.6E−28 |
| MSM0195 | Msp_0622 | conserved hypothetical protein | 4.8E−31 | MTH_266 | conserved protein | 1.3E−33 |
| MSM0196 | Msp_0623 | RpoE2 | 9.0E−14 | NONE | DNA-dependent RNA | 1.5E−18 |
| | | | | | polymerase, subunit E″ | |
| MSM0197 | Msp_0624 | RpoE1 | 2.2E−65 | NONE | DNA-dependent RNA | 1.3E−67 |
| | | | | | polymerase, subunit E′ | |
| MSM0198 | Msp_0625 | inorganic pyrophosphatase | 3.1E−68 | MTH_263 | inorganic | 7.2E−65 |
| | | | | | pyrophosphatase | |
| MSM0199 | Msp_0626 | conserved hypothetical protein | 2.4E−22 | MTH_262 | conserved protein | 3.7E−29 |
| MSM0200 | Msp_0627 | putative translation initiation factor | 3.3E−158 | NONE | translation initiation factor | 1.6E−163 |
| | | 2, subunit gamma (aIF- | | | eIF-2, gamma subunit | |
| | | 2gamma)(eIF2G) | | | | |
| MSM0201 | Msp_0628 | 30S ribosomal protein S6e | 9.9E−40 | MTH_260 | ribosomal protein S6 | 1.5E−41 |
| MSM0202 | Msp_0629 | InfB | 9.3E−202 | MTH_259 | translation initiation factor | 2.6E−218 |
| | | | | | IF2 homolog | |
| MSM0203 | Msp_0630 | nucleoside diphosphate kinase | 1.8E−56 | MTH_258 | nucleoside diphosphate | 1.9E−57 |
| | | | | | kinase | |
| MSM0204 | Msp_0631 | 50S ribosomal protein L24e | 3.0E−22 | MTH_257 | ribosomal protein L24 | 8.2E−25 |
| MSM0205 | Msp_0632 | 30S ribosomal protein S28e | 4.3E−30 | MTH_256 | ribosomal protein S28 | 2.2E−31 |
| MSM0206 | Msp_0633 | 50S ribosomal protein L7Ae | 9.3E−44 | MTH_255 | ribosomal protein L7a | 1.3E−44 |
| MSM0207 | NONE | | | MTH_1178 | conserved protein | 1.9E−41 |
| MSM0208 | NONE | | | MTH_1178 | conserved protein | 3.9E−08 |
| MSM0209 | Msp_0861 | ferredoxin | 7.3E−12 | MTH_1106 | ferredoxin | 7.6E−22 |
| MSM0210 | Msp_0253 | conserved hypothetical | 1.1E−04 | NONE | | |
| | | membrane-spanning protein | | | | |
| MSM0211 | NONE | | | NONE | | |
| MSM0212 | NONE | | | NONE | | |
| MSM0213 | Msp_0769 | archaeal histone | 8.2E−20 | MTH_821 | histone HMtA1 | 3.7E−22 |
| MSM0214 | Msp_0588 | ThrC | 2.0E−153 | MTH_253 | threonine synthase | 8.8E−163 |
| MSM0215 | Msp_0232 | hypothetical membrane-spanning | 2.4E−22 | MTH_252 | conserved protein | 4.5E−24 |
| | | protein | | | | |
| MSM0216 | Msp_0653 | TrpS | 5.0E−132 | MTH_251 | tryptophanyl-tRNA | 1.8E−116 |
| | | | | | synthetase | |
| MSM0217 | Msp_0652 | EndA | 5.0E−45 | MTH_250 | tRNA intron endonuclease | 2.7E−49 |
| MSM0218 | Msp_0446 | predicted metal-dependent | 5.3E−57 | MTH_214 | iron repressor | 6.4E−57 |
| | | transcriptional regulator | | | | |
| MSM0219 | Msp_1129 | partially conserved hypothetical | 1.0E−46 | MTH_357 | conserved protein | 4.0E−67 |
| | | membrane-spanning protein | | | | |
| MSM0220 | Msp_0114 | ThsB | 1.7E−170 | MTH_218 | chaperonin | 4.0E−183 |
| MSM0221 | Msp_0590 | member of asn/thr-rich large | 6.9E−13 | MTH_719 | cell surface glycoprotein | 4.2E−05 |
| | | protein family | | | (s-layer protein) | |
| MSM0222 | Msp_0787 | FprA | 2.5E−128 | MTH_220 | flavoprotein A homolog (II) | 3.2E−133 |
| MSM0223 | NONE | | | MTH_557 | unknown | 1.4E−22 |
| MSM0224 | NONE | | | MTH_558 | unknown | 2.1E−28 |
| MSM0225 | Msp_1294 | conserved hypothetical | 1.4E−47 | MTH_559 | conserved protein | 1.4E−54 |
| | | membrane-spanning protein | | | | |
| MSM0226 | NONE | | | NONE | | |
| MSM0227 | Msp_0584 | HmgA | 2.2E−138 | MTH_562 | 3-hydroxy-3- | 1.7E−143 |
| | | | | | methylglutaryl CoA | |
| | | | | | reductase | |
| MSM0228 | Msp_0583 | SucD | 1.7E−99 | NONE | succinyl-CoA synthetase, | 1.3E−111 |
| | | | | | alpha subunit | |
| MSM0229 | Msp_0582 | conserved hypothetical protein | 1.6E−69 | MTH_564 | conserved protein | 1.5E−87 |
| MSM0230 | Msp_0233 | conserved hypothetical protein | 2.9E−21 | NONE | | |
| MSM0231 | Msp_0577 | AroD | 9.9E−40 | MTH_566 | 3-dehydroquinate | 2.9E−52 |
| | | | | | dehydratase | |
| MSM0232 | Msp_0145 | member of asn/thr-rich large | 3.8E−05 | MTH_567 | unknown | 7.5E−31 |
| | | protein family | | | | |
| MSM0233 | Msp_0664 | nitrogen regulatory protein P-II | 7.9E−31 | MTH_664 | nitrogen regulatory protein | 1.4E−36 |
| | | | | | P-II | |
| MSM0234 | Msp_0663 | ammonium transporter | 4.8E−150 | MTH_663 | ammonium transporter | 1.2E−142 |
| MSM0235 | Msp_0119 | hypothetical membrane-spanning | 6.0E−04 | MTH_181 | unknown | 1.4E−04 |
| | | protein | | | | |
| MSM0236 | Msp_0434 | predicted phosphohydrolase | 1.2E−100 | MTH_148 | conserved protein | 7.8E−123 |
| MSM0237 | Msp_0088 | predicted 3-polyprenyl-4- | 3.1E−59 | MTH_147 | phenylacrylic acid | 2.6E−53 |
| | | hydroxybenzoate decarboxylase | | | decarboxylase | |
| MSM0238 | Msp_0087 | CbiT | 4.2E−48 | MTH_146 | precorrin-8W | 3.1E−48 |
| | | | | | decarboxylase | |
| MSM0239 | NONE | | | MTH_145 | conserved protein | 6.9E−44 |
| MSM0240 | Msp_1289 | conserved hypothetical protein | 8.3E−07 | MTH_143 | molybdopterin-guanine | 1.6E−30 |
| | | | | | dinucleotide biosynthesis | |
| | | | | | MobA related protein | |
| MSM0241 | Msp_1252 | putative exosome complex, | 1.1E−61 | MTH_682 | conserved protein | 5.6E−90 |
| | | exonuclease 2 subunit | | | | |
| MSM0242 | Msp_1251 | putative exosome complex, | 1.4E−79 | MTH_683 | ribonuclease PH | 1.1E−93 |
| | | exonuclease 1 subunit | | | | |
| MSM0243 | Msp_1250 | putative exosome complex, RNA- | 1.6E−48 | MTH_684 | conserved protein | 2.1E−90 |
| | | binding subunit | | | | |
| MSM0244 | Msp_1249 | conserved hypothetical protein | 1.8E−70 | MTH_685 | conserved protein | 8.3E−80 |
| MSM0245 | Msp_1248 | PsmA | 6.3E−77 | NONE | proteasome, alpha | 2.5E−94 |
| | | | | | subunit | |
| MSM0246 | Msp_1246 | putative ribonuclease P, | 1.3E−19 | MTH_687 | conserved protein | 2.3E−22 |
| | | component 2 | | | | |
| MSM0247 | Msp_1245 | putative ribonuclease P, | 2.1E−28 | MTH_688 | conserved protein | 3.1E−41 |
| | | component 3 | | | | |
| MSM0248 | Msp_0950 | hypothetical protein | 7.2E−05 | NONE | | |
| MSM0249 | Msp_1548 | hypothetical protein | 1.8E−04 | MTH_301 | unknown | 4.1E−23 |
| MSM0250 | Msp_0501 | hypothetical membrane-spanning | 1.0E−05 | MTH_521 | unknown | 3.6E−10 |
| | | protein | | | | |
| MSM0251 | Msp_0725 | hypothetical protein | 1.5E−04 | NONE | | |
| MSM0252 | Msp_0824 | predicted Na+-driven multidrug | 1.6E−96 | MTH_314 | conserved protein | 3.7E−93 |
| | | efflux pump | | | | |
| MSM0253 | NONE | | | MTH_1725 | unknown | 1.4E−15 |
| MSM0254 | NONE | | | NONE | | |
| MSM0255 | NONE | | | NONE | | |
| MSM0256 | Msp_0017 | conserved hypothetical protein | 1.7E−28 | NONE | | |
| MSM0257 | Msp_0975 | hypothetical membrane-spanning | 4.3E−30 | NONE | | |
| | | protein | | | | |
| MSM0258 | Msp_0724 | hypothetical membrane-spanning | 1.6E−04 | NONE | | |
| | | protein | | | | |
| MSM0259 | Msp_1548 | hypothetical protein | 1.1E−05 | MTH_521 | unknown | 6.8E−04 |
| MSM0260 | Msp_0507 | predicted archaea-specific RecJ- | 2.0E−199 | MTH_763 | conserved protein | 3.4E−225 |
| | | like exonuclease | | | | |
| MSM0261 | Msp_1384 | conserved hypothetical | 1.1E−04 | MTH_759 | unknown | 1.5E−16 |
| | | membrane-spanning protein | | | | |
| MSM0262 | Msp_0788 | desulfoferrodoxin | 1.4E−26 | MTH_757 | rubredoxin | 3.4E−26 |
| | | | | | oxidoreductase | |
| MSM0263 | Msp_1003 | predicted NifU protein | 1.1E−47 | NONE | | |
| MSM0264 | Msp_1002 | IscS | 6.6E−121 | MTH_1389 | nifS protein | 1.6E−30 |
| MSM0265 | Msp_0677 | predicted O-acetylhomoserine | 1.5E−148 | MTH_1188 | pleiotropic regulatory | 3.1E−04 |
| | | sulfhydrylase | | | protein DegT | |
| MSM0266 | Msp_0145 | member of asn/thr-rich large | 2.7E−50 | MTH_911 | probable surface protein | 6.2E−09 |
| | | protein family | | | | |
| MSM0267 | Msp_0844 | predicted multimeric flavodoxin | 4.4E−53 | MTH_135 | conserved protein | 2.7E−17 |
| MSM0268 | Msp_0124 | CysS | 1.2E−139 | MTH_587 | methionyl-tRNA | 9.6E−08 |
| | | | | | synthetase | |
| MSM0269 | Msp_0527 | conserved hypothetical protein | 8.0E−38 | NONE | | |
| MSM0270 | Msp_0450 | predicted serine acetyltransferase | 8.1E−61 | MTH_1588 | ferripyochelin binding | 2.0E−06 |
| | | | | | protein | |
| MSM0271 | Msp_0449 | cysteine synthase | 2.2E−97 | NONE | tryptophan synthase, beta | 3.1E−08 |
| | | | | | subunit | |
| MSM0272 | Msp_0497 | putative endonuclease III | 2.2E−67 | MTH_764 | endonuclease III | 1.1E−70 |
| MSM0273 | Msp_0498 | AroA | 1.1E−102 | MTH_766 | 5-enolpyruvylshikimate 3- | 2.5E−62 |
| | | | | | phosphate synthase | |
| MSM0274 | NONE | | | NONE | | |
| MSM0275 | Msp_0499 | ValS | 2.4E−235 | MTH_767 | valyl-tRNA synthetase | 0.0E+00 |
| MSM0276 | Msp_0526 | hypothetical membrane-spanning | 8.1E−29 | MTH_768 | unknown | 2.9E−22 |
| | | protein | | | | |
| MSM0277 | Msp_0525 | PheT | 3.3E−151 | MTH_770 | phenylalanyl-tRNA | 4.2E−172 |
| | | | | | synthetase | |
| MSM0278 | NONE | | | NONE | | |
| MSM0279 | Msp_0522 | conserved hypothetical protein | 4.0E−36 | MTH_771 | conserved protein | 2.7E−35 |
| MSM0280 | Msp_0757 | predicted ATPase | 4.4E−13 | NONE | | |
| MSM0281 | Msp_0145 | member of asn/thr-rich large | 2.1E−09 | MTH_911 | probable surface protein | 2.9E−10 |
| | | protein family | | | | |
| MSM0282 | Msp_0141 | member of asn/thr-rich large | 1.3E−23 | MTH_911 | probable surface protein | 1.1E−17 |
| | | protein family | | | | |
| MSM0283 | NONE | | | MTH_436 | unknown | 1.1E−04 |
| MSM0284 | Msp_0995 | RpiA | 5.8E−74 | MTH_608 | ribose 5-phosphate | 1.3E−74 |
| | | | | | isomerase | |
| MSM0285 | Msp_0996 | conserved hypothetical protein | 1.3E−28 | MTH_609 | conserved protein | 1.3E−35 |
| MSM0286 | Msp_0997 | EgsA | 7.9E−102 | MTH_610 | glycerol 1-phosphate | 1.5E−112 |
| | | | | | dehydrogenase | |
| MSM0287 | Msp_1004 | ProS | 8.6E−160 | MTH_611 | prolyl-tRNA synthetase | 1.4E−155 |
| MSM0288 | Msp_1006 | conserved hypothetical protein | 1.7E−53 | MTH_613 | conserved protein | 4.2E−60 |
| MSM0289 | Msp_1007 | ThiD | 3.6E−58 | MTH_614 | transcriptional regulator | 5.1E−64 |
| MSM0290 | Msp_1000 | predicted ABC-type | 2.6E−71 | MTH_920 | anion permease | 1.4E−31 |
| | | nitrate/sulfonate/bicarbonate | | | | |
| | | transport system, ATB-binding | | | | |
| | | protein | | | | |
| MSM0291 | Msp_1001 | predicted ABC-type | 1.9E−84 | MTH_1730 | phosphate transporter | 4.8E−07 |
| | | nitrate/sulfonate/bicarbonate | | | permease PstC homolog | |
| | | transport system, permease | | | | |
| | | protein | | | | |
| MSM0292 | NONE | | | NONE | | |
| MSM0293 | Msp_0826 | predicted cation transport ATPase | 1.8E−198 | MTH_1535 | heavy-metal transporting | 1.2E−69 |
| | | | | | CPx-type ATPase | |
| MSM0294 | Msp_0825 | hypothetical protein | 4.2E−09 | NONE | | |
| MSM0295 | NONE | | | NONE | nitrate assimilation | 7.1E−49 |
| | | | | | protein, narQ | |
| MSM0296 | NONE | | | MTH_691 | conserved protein | 1.2E−30 |
| MSM0297 | Msp_1244 | predicted exosome subunit | 1.1E−24 | MTH_689 | conserved protein | 2.7E−26 |
| MSM0298 | Msp_1243 | 50S ribosomal protein L15e | 2.1E−76 | MTH_690 | ribosomal protein L15 | 1.3E−67 |
| MSM0299 | NONE | | | NONE | | |
| MSM0300 | Msp_0851 | predicted ABC-type | 1.5E−139 | NONE | | |
| | | dipeptide/oligopeptide/nickel | | | | |
| | | transport system, solute-binding | | | | |
| | | protein | | | | |
| MSM0301 | Msp_0811 | ABC-type dipeptide transport | 2.3E−120 | NONE | | |
| | | system, permease protein | | | | |
| MSM0302 | Msp_0810 | ABC-type dipeptide transport | 1.7E−99 | MTH_1729 | phosphate transporter | 2.3E−05 |
| | | system, permease protein | | | permease PstC | |
| MSM0303 | Msp_0848 | predicted ABC-type | 3.4E−101 | MTH_696 | ABC transporter | 1.4E−20 |
| | | dipeptide/oligopeptide/nickel | | | (glutamine transport ATP- | |
| | | transport system, ATP-binding | | | binding protein) | |
| | | protein | | | | |
| MSM0304 | Msp_0847 | predicted ABC-type | 4.8E−63 | NONE | methyl coenzyme M | 7.3E−21 |
| | | dipeptide/oligopeptide/nickel | | | reductase system, | |
| | | transport system, ATP-binding | | | component A2 | |
| | | protein | | | | |
| MSM0305 | Msp_0431 | GuaB | 6.1E−10 | MTH_406 | conserved protein | 7.6E−70 |
| MSM0306 | Msp_1447 | EhbK | 3.0E−18 | MTH_405 | polyferredoxin | 1.6E−37 |
| MSM0307 | Msp_0071 | predicted ribokinase | 3.4E−62 | MTH_404 | ribokinase | 3.5E−65 |
| MSM0308 | Msp_0070 | formylmethanofuran- | 6.7E−89 | MTH_403 | formylmethanofuran:tetrahydro- | 1.7E−95 |
| | | tetrahydromethanopterin | | | methanopterin formyltransferase II | |
| | | formyltransferase | | | | |
| MSM0309 | Msp_0069 | conserved hypothetical | 2.4E−68 | MTH_402 | unknown | 3.9E−57 |
| | | membrane-spanning protein | | | | |
| MSM0310 | Msp_1447 | EhbK | 1.7E−23 | MTH_401 | polyferredoxin | 7.7E−77 |
| MSM0311 | Msp_1447 | EhbK | 2.1E−13 | MTH_399 | polyferredoxin | 7.4E−111 |
| MSM0312 | Msp_1444 | EhbN | 2.2E−51 | NONE | formate hydrogenlyase, | 7.8E−139 |
| | | | | | subunit 5 | |
| MSM0313 | Msp_1445 | EhbM | 5.4E−32 | NONE | formate hydrogenlyase, | 6.3E−66 |
| | | | | | subunit 7 | |
| MSM0314 | NONE | | | MTH_396 | conserved protein | 2.9E−29 |
| MSM0315 | NONE | | | MTH_395 | conserved protein | 1.9E−18 |
| MSM0316 | Msp_0616 | partially conserved hypothetical | 9.5E−04 | MTH_394 | unknown | 5.8E−08 |
| | | membrane-spanning protein | | | | |
| MSM0317 | Msp_1443 | EhbO | 1.1E−16 | NONE | NADH dehydrogenase | 1.9E−105 |
| | | | | | (ubiquinone), subunit 1 | |
| | | | | | related protein | |
| MSM0318 | NONE | | | MTH_392 | unknown | 1.4E−15 |
| MSM0319 | Msp_1452 | EhbF | 4.0E−06 | NONE | NADH dehydrogenase I, | 5.5E−83 |
| | | | | | subunit N related protein | |
| MSM0320 | NONE | | | MTH_390 | conserved protein | 7.0E−67 |
| MSM0321 | NONE | | | MTH_389 | conserved protein | 6.6E−55 |
| MSM0322 | NONE | | | MTH_388 | unknown | 1.5E−25 |
| MSM0323 | NONE | | | MTH_387 | conserved protein | 3.9E−18 |
| MSM0324 | NONE | | | MTH_386 | unknown | 6.4E−18 |
| MSM0325 | NONE | | | MTH_385 | conserved protein | 4.1E−55 |
| MSM0326 | NONE | | | MTH_384 | unknown | 3.5E−17 |
| MSM0327 | Msp_0067 | putative UDP-glucose 4- | 1.2E−73 | MTH_380 | UDP-glucose 4-epimerase | 1.7E−86 |
| | | epimerase | | | homolog | |
| MSM0328 | NONE | | | MTH_698 | unknown | 2.7E−10 |
| MSM0329 | Msp_0265 | conserved hypothetical protein | 7.4E−51 | MTH_700 | conserved protein | 5.1E−64 |
| MSM0330 | Msp_0266 | predicted acyl-CoA synthetase | 1.1E−184 | MTH_701 | acetyl-CoA synthetase | 1.0E−138 |
| | | | | | related protein | |
| MSM0331 | Msp_1390 | KorD | 7.0E−07 | NONE | 2-oxoisovalerate | 7.9E−20 |
| | | | | | oxidoreductase, gamma | |
| | | | | | subunit | |
| MSM0332 | Msp_1389 | KorA | 1.6E−56 | NONE | 2-oxoisovalerate | 6.4E−144 |
| | | | | | oxidoreductase, beta | |
| | | | | | subunit | |
| MSM0333 | Msp_1388 | KorB | 2.0E−28 | NONE | 2-oxoisovalerate | 8.0E−169 |
| | | | | | oxidoreductase, alpha | |
| | | | | | subunit | |
| MSM0334 | Msp_1411 | GatD | 9.1E−140 | MTH_706 | L-asparaginase I | 6.4E−144 |
| MSM0335 | Msp_1412 | GatE | 8.1E−187 | MTH_707 | PET112-like protein | 7.1E−209 |
| MSM0336 | NONE | | | NONE | | |
| MSM0337 | Msp_0145 | member of asn/thr-rich large | 1.1E−08 | NONE | | |
| | | protein family | | | | |
| MSM0338 | NONE | | | NONE | | |
| MSM0339 | NONE | | | NONE | | |
| MSM0340 | Msp_1413 | predicted thioredoxin reductase | 1.4E−70 | MTH_708 | thioredoxin reductase | 6.9E−92 |
| MSM0341 | NONE | | | NONE | | |
| MSM0342 | Msp_0017 | conserved hypothetical protein | 1.7E−28 | NONE | | |
| MSM0343 | Msp_1311 | GMP synthase [glutamine | 4.2E−64 | NONE | GMP synthetase, subunit A | 1.1E−68 |
| | | hydrolyzing], subunit A | | | | |
| MSM0344 | NONE | | | NONE | | |
| MSM0345 | Msp_1312 | GMP synthase [glutamine | 3.4E−117 | NONE | GMP synthetase, subunit B | 7.1E−122 |
| | | hydrolyzing], subunit B | | | | |
| MSM0346 | Msp_1315 | conserved hypothetical protein | 8.0E−125 | MTH_720 | unknown | 3.1E−128 |
| MSM0347 | Msp_1316 | conserved hypothetical protein | 6.5E−43 | MTH_721 | conserved protein | 8.6E−62 |
| MSM0348 | Msp_1317 | conserved hypothetical protein | 7.1E−14 | MTH_722 | conserved protein | 2.3E−22 |
| MSM0349 | Msp_1317 | conserved hypothetical protein | 1.5E−05 | MTH_722 | conserved protein | 1.2E−04 |
| MSM0350 | Msp_1318 | predicted | 3.9E−155 | MTH_723 | 2-isopropylmalate | 6.2E−162 |
| | | isopropylmalate/homocitrate/citramalate | | | synthase | |
| | | synthase | | | | |
| MSM0351 | NONE | | | NONE | | |
| MSM0352 | Msp_1319 | predicted DNA modification | 1.4E−72 | MTH_724 | methyltransferase related | 4.3E−83 |
| | | methylase | | | protein | |
| MSM0353 | Msp_1321 | hypothetical membrane-spanning | 4.8E−11 | NONE | | |
| | | protein | | | | |
| MSM0354 | Msp_1206 | proteasome-activating | 4.1E−144 | MTH_728 | ATP-dependent 26S | 1.2E−172 |
| | | nucleotidase | | | protease regulatory | |
| | | | | | subunit 4 | |
| MSM0355 | Msp_1207 | predicted transcriptional regulator | 7.4E−35 | MTH_729 | conserved protein | 2.7E−33 |
| MSM0356 | Msp_1208 | conserved hypothetical protein | 2.3E−24 | MTH_730 | conserved protein | 6.2E−27 |
| MSM0357 | Msp_1209 | conserved hypothetical | 1.6E−128 | MTH_731 | unknown | 1.5E−110 |
| | | membrane-spanning protein | | | | |
| MSM0358 | Msp_1210 | conserved hypothetical | 7.3E−44 | MTH_733 | unknown | 3.7E−45 |
| | | membrane-spanning protein | | | | |
| MSM0359 | Msp_1213 | predicted UDP-N-acetylmuramyl | 1.7E−108 | MTH_530 | UDP-N-acetylmuramyl | 5.2E−14 |
| | | tripeptide synthase | | | tripeptide synthetase | |
| | | | | | related protein | |
| MSM0360 | Msp_1214 | predicted UDP-N-acetylmuramyl | 1.9E−91 | MTH_735 | phospho-N- | 2.8E−102 |
| | | pentapeptide phosphotransferase | | | acetylmuramoyl- | |
| | | | | | pentapeptide-transferase | |
| MSM0361 | Msp_1215 | partially conserved hypothetical | 6.8E−96 | MTH_736 | conserved protein | 2.0E−76 |
| | | protein, predicted carbamoyl- | | | | |
| | | phosphate synthase, large chain | | | | |
| MSM0362 | Msp_1216 | partially conserved hypothetical | 5.4E−16 | NONE | coenzyme F420-reducing | 5.3E−30 |
| | | protein | | | hydrogenase, delta | |
| | | | | | subunit homolog | |
| MSM0363 | Msp_1217 | predicted RNA methylase | 3.2E−50 | MTH_738 | conserved protein | 1.0E−56 |
| MSM0364 | Msp_1218 | putative nickel responsive | 3.0E−54 | MTH_739 | conserved protein | 9.1E−58 |
| | | regulator | | | | |
| MSM0365 | Msp_1090 | hypothetical protein | 2.1E−23 | MTH_741 | unknown | 1.8E−22 |
| MSM0366 | NONE | | | NONE | | |
| MSM0367 | Msp_0099 | conserved hypothetical protein | 6.0E−17 | MTH_812 | conserved protein | 5.6E−26 |
| MSM0368 | Msp_0667 | putative glutamate synthase, | 1.3E−193 | NONE | glutamate synthase | 1.3E−216 |
| | | subunit 2 with ferredoxin domain | | | (NADPH), alpha subunit | |
| MSM0369 | Msp_0669 | putative glutamate synthase, | 1.2E−68 | NONE | tungsten | 1.1E−82 |
| | | subunit 3 | | | formylmethanofuran | |
| | | | | | dehydrogenase, subunit C | |
| | | | | | homolog | |
| MSM0370 | Msp_0670 | putative glutamate synthase, | 5.7E−115 | MTH_191 | glutamine PRPP | 2.2E−127 |
| | | subunit 1 | | | amidotransferase | |
| MSM0371 | Msp_0671 | predicted glutamine | 6.2E−54 | MTH_190 | conserved protein | 3.3E−60 |
| | | amidotransferase | | | | |
| MSM0372 | Msp_0673 | partially conserved hypothetical | 1.3E−23 | MTH_187 | conserved protein | 2.8E−24 |
| | | protein | | | | |
| MSM0373 | Msp_1484 | LeuB | 3.3E−96 | MTH_184 | isocitrate dehydrogenase | 4.5E−104 |
| MSM0374 | Msp_0447 | predicted acyl-CoA synthetase | 8.3E−178 | MTH_657 | long-chain-fatty-acid-CoA | 5.0E−58 |
| | | | | | ligase | |
| MSM0375 | Msp_0550 | ArgB | 2.3E−111 | MTH_183 | acetylglutamate kinase | 2.5E−110 |
| MSM0376 | Msp_0967 | putative NADP-dependent alcohol | 6.2E−06 | NONE | | |
| | | dehydrogenase | | | | |
| MSM0377 | Msp_0310 | predicted | 4.9E−07 | MTH_1152 | conserved protein | 6.5E−05 |
| | | GTP:adenosylcobinamide- | | | | |
| | | phosphate guanylyltransferase | | | | |
| MSM0378 | NONE | | | MTH_1876 | conserved protein | 1.3E−24 |
| MSM0379 | Msp_0549 | ArgJ | 6.5E−107 | MTH_182 | glutamate N- | 1.9E−103 |
| | | | | | acetyltransferase | |
| MSM0380 | Msp_0506 | hypothetical membrane-spanning | 2.1E−05 | MTH_181 | unknown | 1.8E−04 |
| | | protein | | | | |
| MSM0381 | Msp_0546 | conserved hypothetical | 2.8E−99 | MTH_180 | unknown | 1.4E−114 |
| | | membrane-spanning protein | | | | |
| MSM0382 | Msp_0545 | conserved hypothetical protein | 3.7E−95 | MTH_179 | unknown | 1.9E−103 |
| MSM0383 | Msp_0544 | predicted phosphohydrolase | 1.0E−62 | MTH_178 | lcc related protein | 2.6E−53 |
| MSM0384 | Msp_0543 | conserved hypothetical protein | 4.1E−34 | MTH_177 | conserved protein | 1.9E−34 |
| MSM0385 | Msp_0511 | predicted Fe—S oxidoreductase | 3.2E−07 | MTH_1784 | Mg-protoporphyrin IX | 9.9E−84 |
| | | | | | monomethyl ester | |
| | | | | | oxidative cyclase | |
| MSM0386 | Msp_0148 | predicted sodium:solute | 1.9E−178 | MTH_1856 | sodium/proline symporter | 1.5E−181 |
| | | symporter | | | (proline permease) | |
| MSM0387 | Msp_1040 | coenzyme F390 synthetase II | 2.2E−145 | MTH_1855 | coenzyme F390 | 1.4E−162 |
| | | | | | synthetase II | |
| MSM0388 | Msp_1041 | predicted regulatory protein | 4.1E−34 | MTH_1854 | unknown | 2.6E−37 |
| MSM0389 | Msp_0136 | hypothetical protein | 1.5E−06 | NONE | | |
| MSM0390 | NONE | | | NONE | | |
| MSM0391 | Msp_1042 | IorB | 5.6E−53 | NONE | indolepyruvate | 2.4E−50 |
| | | | | | oxidoreductase, beta | |
| | | | | | subunit | |
| MSM0392 | Msp_1043 | IorA | 6.7E−185 | NONE | indolepyruvate | 4.1E−192 |
| | | | | | oxidoreductase, alpha | |
| | | | | | subunit | |
| MSM0393 | Msp_1044 | TfrB | 3.3E−135 | MTH_1850 | fumarate reductase | 1.4E−155 |
| MSM0394 | Msp_1047 | predicted rRNA methylase | 2.2E−65 | MTH_1849 | conserved protein | 1.2E−69 |
| MSM0395 | Msp_1581 | partially conserved hypothetical | 2.7E−46 | MTH_745 | unknown (contains | 3.9E−57 |
| | | protein | | | ferredoxin domain) | |
| MSM0396 | Msp_0233 | conserved hypothetical protein | 2.3E−22 | NONE | | |
| MSM0397 | NONE | | | NONE | | |
| MSM0398 | Msp_1229 | ribose-phosphate | 6.6E−04 | MTH_1114 | uracil | 6.6E−23 |
| | | pyrophosphokinase | | | phosphoribosyltransferase | |
| MSM0399 | NONE | | | NONE | | |
| MSM0400 | NONE | | | NONE | | |
| MSM0401 | NONE | | | MTH_75 | surface protease related | 2.7E−27 |
| | | | | | protein | |
| MSM0402 | Msp_1048 | deoxycytidine triphosphate | 3.5E−76 | MTH_1847 | deoxycytidine | 1.1E−75 |
| | | deaminase | | | triphosphate deaminase | |
| MSM0403 | Msp_1049 | GlyS | 2.1E−188 | MTH_1846 | glycyl-tRNA synthetase | 7.6E−196 |
| MSM0404 | Msp_0799 | predicted transcriptional regulator | 1.6E−25 | MTH_1843 | unknown | 9.1E−26 |
| MSM0405 | Msp_1050 | predicted metal-dependent | 1.7E−58 | MTH_1842 | conserved protein | 2.5E−46 |
| | | hydrolase | | | | |
| MSM0406 | Msp_1052 | hypothetical protein | 1.7E−10 | MTH_1838 | unknown | 6.6E−23 |
| MSM0407 | Msp_1053 | conserved hypothetical | 1.7E−115 | MTH_1837 | unknown | 1.2E−124 |
| | | membrane-spanning protein | | | | |
| MSM0408 | Msp_0406 | 2-phosphoglycerate kinase- | 4.2E−80 | MTH_1835 | 2-phosphoglycerate | 2.3E−91 |
| | | like/predicted small molecule- | | | kinase homolog | |
| | | binding domain fusion | | | | |
| MSM0409 | Msp_0407 | conserved hypothetical protein | 2.2E−42 | MTH_1834 | conserved protein | 9.5E−47 |
| MSM0410 | Msp_0409 | conserved hypothetical protein | 3.9E−52 | MTH_1833 | unknown | 4.6E−47 |
| MSM0411 | Msp_0145 | member of asn/thr-rich large | 1.3E−25 | MTH_1074 | putative membrane | 1.3E−115 |
| | | protein family | | | protein | |
| MSM0412 | Msp_0046 | member of asn/thr-rich large | 1.3E−06 | MTH_117 | unknown | 2.4E−41 |
| | | protein family | | | | |
| MSM0413 | Msp_0512 | predicted transcriptional regulator | 2.7E−21 | MTH_313 | transcriptional regulator | 1.9E−16 |
| MSM0414 | Msp_0824 | predicted Na+-driven multidrug | 2.8E−138 | MTH_314 | conserved protein | 6.7E−110 |
| | | efflux pump | | | | |
| MSM0415 | Msp_1362 | PyrH | 3.5E−76 | MTH_879 | uridine monophosphate | 2.8E−79 |
| | | | | | kinase | |
| MSM0416 | Msp_0974 | predicted Mg-dependent DNase | 1.5E−93 | MTH_233 | conserved protein | 8.0E−27 |
| MSM0417 | Msp_1361 | hypothetical membrane-spanning | 3.8E−15 | MTH_880 | unknown | 3.2E−14 |
| | | protein | | | | |
| MSM0418 | Msp_1045 | conserved hypothetical protein | 2.5E−34 | MTH_507 | conserved protein | 2.5E−32 |
| MSM0419 | Msp_0253 | conserved hypothetical | 1.4E−24 | MTH_506 | unknown | 4.2E−21 |
| | | membrane-spanning protein | | | | |
| MSM0420 | Msp_0355 | conserved hypothetical | 3.0E−22 | MTH_882 | conserved protein | 1.1E−27 |
| | | membrane-spanning protein | | | | |
| MSM0421 | NONE | | | NONE | | |
| MSM0422 | Msp_0644 | conserved hypothetical | 1.1E−36 | MTH_883 | unknown | 6.3E−48 |
| | | membrane-spanning protein | | | | |
| MSM0423 | Msp_0645 | predicted glycosyltransferase | 6.9E−157 | MTH_884 | teichoic acid biosynthesis | 4.5E−184 |
| | | | | | related protein | |
| MSM0424 | Msp_1360 | transcription initiation factor IIB | 8.1E−148 | MTH_885 | transcription initiation | 9.2E−152 |
| | | (TFIIB) | | | factor TFIIB | |
| MSM0425 | Msp_1359 | hypothetical protein | 2.3E−15 | MTH_886 | conserved protein | 3.4E−19 |
| MSM0426 | Msp_1358 | predicted demethylmenaquinone | 3.7E−33 | MTH_888 | conserved protein | 3.2E−46 |
| | | methyltransferase | | | | |
| MSM0427 | Msp_1356 | predicted DNA primase | 7.2E−108 | MTH_891 | conserved protein | 2.9E−141 |
| MSM0428 | Msp_1355 | predicted site-specific | 2.5E−66 | MTH_893 | integrase-recombinase | 7.7E−77 |
| | | recombinase/integrase | | | protein | |
| MSM0429 | Msp_1354 | conserved hypothetical protein | 4.3E−46 | MTH_905 | conserved protein | 1.8E−38 |
| MSM0430 | NONE | | | MTH_906 | unknown | 2.7E−17 |
| MSM0431 | Msp_1132 | predicted ATP-dependent | 1.7E−44 | MTH_947 | conserved protein | 2.8E−40 |
| | | carboligase | | | | |
| MSM0432 | Msp_1131 | hypothetical membrane-spanning | 5.5E−07 | NONE | | |
| | | protein | | | | |
| MSM0433 | Msp_1133 | AhaD | 1.6E−69 | NONE | ATP synthase, subunit D | 1.5E−73 |
| MSM0434 | Msp_1134 | AhaB | 1.4E−212 | NONE | ATP synthase, subunit B | 4.5E−214 |
| MSM0435 | Msp_1135 | AhaA | 1.4E−246 | NONE | ATP synthase, subunit A | 2.8E−260 |
| MSM0436 | Msp_1136 | AhaF | 8.6E−25 | NONE | ATP synthase, subunit F | 3.1E−25 |
| MSM0437 | Msp_1137 | AhaC | 1.5E−105 | NONE | ATP synthase, subunit C | 7.7E−116 |
| MSM0438 | Msp_1138 | AhaE | 3.2E−50 | NONE | ATP synthase, subunit E | 5.9E−54 |
| MSM0439 | Msp_1139 | AhaK | 7.0E−62 | NONE | ATP synthase, subunit K | 9.7E−70 |
| MSM0440 | Msp_1140 | AhaI | 1.9E−148 | NONE | ATP synthase, subunit I | 3.5E−191 |
| MSM0441 | Msp_1141 | AhaH | 7.6E−17 | MTH_961 | unknown | 3.1E−18 |
| MSM0442 | NONE | | | NONE | | |
| MSM0443 | NONE | | | NONE | | |
| MSM0444 | NONE | | | NONE | | |
| MSM0445 | Msp_0408 | putative nitroreductase protein | 2.0E−55 | MTH_120 | NADPH-oxidoreductase | 1.4E−13 |
| MSM0446 | NONE | | | MTH_962 | citrate synthase I | 6.2E−75 |
| MSM0447 | Msp_0338 | fumarate hydratase | 2.6E−15 | NONE | fumarate hydratase, class | 3.8E−75 |
| | | | | | I related protein | |
| MSM0448 | NONE | | | MTH_964 | unknown | 4.6E−102 |
| MSM0449 | NONE | | | MTH_965 | conserved protein | 1.1E−86 |
| MSM0450 | Msp_0680 | conserved hypothetical | 2.4E−38 | NONE | | |
| | | membrane-spanning protein | | | | |
| MSM0451 | Msp_0679 | conserved hypothetical | 7.8E−79 | NONE | | |
| | | membrane-spanning protein | | | | |
| MSM0452 | Msp_1142 | predicted DNA-binding protein | 3.9E−132 | MTH_966 | conserved protein | 1.8E−130 |
| MSM0453 | Msp_1143 | putative transcriptional regulator | 7.5E−58 | MTH_967 | conserved protein | 1.3E−88 |
| MSM0454 | NONE | | | NONE | | |
| MSM0455 | Msp_1144 | conserved hypothetical protein | 2.2E−35 | MTH_969 | unknown | 1.0E−43 |
| MSM0456 | Msp_1005 | conserved hypothetical protein | 2.3E−17 | MTH_544 | conserved protein | 2.7E−35 |
| MSM0457 | Msp_1145 | SerA | 8.8E−158 | MTH_970 | phosphoglycerate | 1.3E−177 |
| | | | | | dehydrogenase | |
| MSM0458 | NONE | | | NONE | | |
| MSM0459 | NONE | | | NONE | | |
| MSM0460 | NONE | | | NONE | | |
| MSM0461 | Msp_0983 | member of asn/thr-rich large | 3.0E−39 | MTH_911 | probable surface protein | 2.9E−18 |
| | | protein family | | | | |
| MSM0462 | Msp_1146 | partially conserved hypothetical | 1.8E−38 | MTH_971 | unknown | 1.0E−33 |
| | | protein | | | | |
| MSM0463 | Msp_1147 | conserved hypothetical protein | 2.0E−57 | MTH_972 | conserved protein | 3.7E−61 |
| MSM0464 | Msp_1148 | predicted dinucleotide-utilizing | 4.0E−59 | MTH_973 | conserved protein | 1.1E−77 |
| | | protein | | | | |
| MSM0465 | Msp_1149 | conserved hypothetical protein | 1.1E−17 | MTH_974 | unknown | 4.1E−23 |
| MSM0466 | Msp_1150 | predicted tRNA-binding protein | 2.4E−68 | MTH_975 | conserved protein | 1.4E−70 |
| MSM0467 | NONE | | | MTH_978 | NADP-dependent | 8.1E−137 |
| | | | | | glyceraldehyde-3- | |
| | | | | | phosphate | |
| | | | | | dehydrogenase | |
| MSM0468 | NONE | | | MTH_1490 | unknown | 2.2E−10 |
| MSM0469 | NONE | | | MTH_1490 | unknown | 1.8E−11 |
| MSM0470 | Msp_1151 | hypothetical membrane-spanning | 1.4E−10 | MTH_979 | unknown | 7.2E−10 |
| | | protein | | | | |
| MSM0471 | Msp_1152 | conserved hypothetical | 7.1E−53 | MTH_980 | conserved protein | 5.9E−70 |
| | | membrane-spanning protein | | | | |
| MSM0472 | Msp_1153 | PepQ | 2.7E−69 | MTH_981 | aminopeptidase P | 1.0E−65 |
| MSM0473 | Msp_0417 | hypothetical membrane-spanning | 2.5E−04 | NONE | | |
| | | protein | | | | |
| MSM0474 | NONE | | | NONE | | |
| MSM0475 | Msp_0417 | hypothetical membrane-spanning | 1.8E−04 | NONE | | |
| | | protein | | | | |
| MSM0476 | NONE | | | MTH_93 | unknown | 8.5E−04 |
| MSM0477 | NONE | | | NONE | | |
| MSM0478 | NONE | | | NONE | | |
| MSM0479 | Msp_1154 | conserved hypothetical | 2.4E−45 | MTH_986 | conserved protein | 2.1E−42 |
| | | membrane-spanning protein | | | | |
| MSM0480 | Msp_1155 | conserved hypothetical protein | 2.3E−95 | MTH_987 | conserved protein | 6.0E−109 |
| MSM0481 | Msp_1274 | conserved hypothetical protein | 4.4E−53 | MTH_989 | conserved protein | 2.2E−24 |
| MSM0482 | Msp_1275 | predicted ATP-utilizing enzyme | 4.6E−58 | MTH_990 | conserved protein | 2.6E−51 |
| MSM0483 | NONE | | | MTH_991 | unknown | 8.6E−14 |
| MSM0484 | Msp_1276 | conserved hypothetical protein | 9.2E−76 | MTH_992 | inosine-5′- | 2.8E−86 |
| | | | | | monophosphate | |
| | | | | | dehydrogenase related | |
| | | | | | protein IX | |
| MSM0485 | Msp_1410 | predicted universal stress protein | 9.6E−26 | MTH_993 | conserved protein | 1.0E−33 |
| MSM0486 | Msp_1199 | predicted metal-dependent | 3.1E−84 | MTH_994 | N-ethylammeline | 4.2E−85 |
| | | hydrolase | | | chlorohydrolase related | |
| | | | | | protein | |
| MSM0487 | NONE | | | NONE | | |
| MSM0488 | Msp_1200 | CarB | 0.0E+00 | NONE | carbamoyl-phosphate | 0.0E+00 |
| | | | | | synthase, large subunit | |
| MSM0489 | Msp_1201 | CarA | 1.5E−121 | NONE | carbamoyl-phosphate | 6.0E−125 |
| | | | | | synthase, small subunit | |
| MSM0490 | Msp_0602 | conserved hypothetical protein | 1.0E−28 | MTH_738 | conserved protein | 3.0E−06 |
| MSM0491 | Msp_0410 | NadC | 2.0E−64 | MTH_1832 | quinolinate | 7.7E−61 |
| | | | | | phosphoribosyltransferase | |
| MSM0492 | Msp_0411 | putative ribonuclease Z | 1.7E−76 | MTH_1831 | conserved protein | 2.6E−92 |
| MSM0493 | Msp_0982 | predicted mechanosensitive ion | 6.7E−25 | MTH_1830 | conserved protein | 1.7E−40 |
| | | channel | | | | |
| MSM0494 | Msp_0643 | NadA | 3.6E−90 | MTH_1827 | quinolinate synthetase | 6.8E−101 |
| MSM0495 | NONE | | | MTH_1821 | unknown | 2.7E−19 |
| MSM0496 | Msp_1526 | putative homoserine O- | 1.2E−84 | MTH_1820 | homoserine O- | 1.3E−67 |
| | | acetyltransferase | | | acetyltransferase | |
| MSM0497 | Msp_0157 | hypothetical protein | 6.9E−55 | MTH_1816 | conserved protein | 2.6E−76 |
| MSM0498 | NONE | | | NONE | | |
| MSM0499 | Msp_1548 | hypothetical protein | 1.0E−05 | MTH_1277 | unknown | 1.8E−06 |
| MSM0500 | Msp_0155 | predicted amidohydrolase | 3.1E−75 | MTH_1811 | N-carbamoyl-D-amino | 3.7E−77 |
| | | | | | acid amidohydrolase | |
| MSM0501 | Msp_0153 | conserved hypothetical protein | 1.8E−31 | MTH_1806 | phycocyanin alpha | 8.1E−34 |
| | | | | | phycocyanobilin lyase | |
| | | | | | CpcE | |
| MSM0502 | Msp_0150 | predicted helicase | 2.9e−310 | MTH_1802 | ATP-dependent helicase | 0.0E+00 |
| MSM0503 | Msp_0553 | hypothetical protein | 9.4E−19 | MTH_1799 | unknown | 3.9E−18 |
| MSM0504 | Msp_0927 | hypothetical protein | 2.1E−05 | MTH_1641 | unknown | 1.4E−06 |
| MSM0505 | NONE | | | NONE | | |
| MSM0506 | Msp_0240 | predicted ATP-utilizing enzyme | 3.0E−148 | MTH_1201 | conserved protein | 3.4E−145 |
| MSM0507 | Msp_0365 | predicted phosphoesterase | 6.0E−49 | MTH_1774 | conserved protein | 2.9E−52 |
| MSM0508 | Msp_0364 | putative 23S rRNA methylase | 1.9E−61 | MTH_1773 | cell division protein J | 5.9E−70 |
| MSM0509 | Msp_0363 | hypothetical membrane-spanning | 1.4E−24 | MTH_1772 | unknown | 9.1E−26 |
| | | protein | | | | |
| MSM0510 | Msp_0362 | predicted minichromosome | 1.4E−255 | MTH_1770 | DNA replication initiator | 1.4E−260 |
| | | maintenance protein | | | (Cdc21/Cdc54) | |
| MSM0511 | Msp_0361 | translation initiation factor aIF-2, | 2.3E−54 | NONE | translation initiation factor | 6.9E−60 |
| | | beta subunit (eIF2B) | | | eIF-2, beta subunit | |
| MSM0512 | Msp_0360 | predicted NMD3-related protein | 5.2E−73 | MTH_1768 | conserved protein | 2.1E−90 |
| MSM0513 | Msp_0359 | TyrS | 2.4E−100 | MTH_1767 | tyrosyl-tRNA synthetase | 1.1E−109 |
| MSM0514 | Msp_0358 | hypothetical protein | 3.5E−05 | MTH_1766 | unknown | 1.1E−08 |
| MSM0515 | Msp_0186 | MtaB2 | 1.3E−156 | NONE | | |
| MSM0516 | Msp_0185 | MtaC3 | 5.2E−89 | NONE | | |
| MSM0517 | Msp_0190 | MapA | 8.7E−167 | MTH_278 | ferredoxin | 7.0E−04 |
| MSM0518 | Msp_0112 | MtaA2 | 2.1E−94 | MTH_775 | cobalamin-independent | 3.4E−05 |
| | | | | | methionine synthase | |
| MSM0519 | Msp_0183 | hypothetical protein | 1.2E−32 | NONE | | |
| MSM0520 | Msp_0357 | putative thymidylate kinase | 2.1E−46 | MTH_1765 | thymidylate kinase | 7.5E−47 |
| MSM0521 | NONE | | | NONE | | |
| MSM0522 | Msp_0984 | predicted peptidase | 2.7E−234 | MTH_1763 | collagenase | 3.4E−99 |
| MSM0523 | Msp_0984 | predicted peptidase | 1.6E−96 | MTH_1763 | collagenase | 6.8E−108 |
| MSM0524 | Msp_0354 | MutS | 4.3E−133 | MTH_1762 | DNA mismatch | 1.9E−176 |
| | | | | | recognition protein MutS | |
| MSM0525 | Msp_1282 | predicted protein kinase | 1.8E−104 | MTH_1645 | ABC transporter | 3.1E−112 |
| MSM0526 | NONE | | | NONE | | |
| MSM0527 | Msp_0017 | conserved hypothetical protein | 3.5E−28 | NONE | | |
| MSM0528 | Msp_0233 | conserved hypothetical protein | 1.4E−10 | NONE | | |
| MSM0529 | Msp_0725 | hypothetical protein | 1.0E−04 | NONE | | |
| MSM0530 | Msp_1323 | conserved hypothetical protein | 3.3E−04 | MTH_72 | O-linked GlcNAc | 5.5E−06 |
| | | | | | transferase | |
| MSM0531 | NONE | | | NONE | | |
| MSM0532 | Msp_0233 | conserved hypothetical protein | 3.4E−08 | NONE | | |
| MSM0533 | Msp_0017 | conserved hypothetical protein | 3.1E−16 | NONE | | |
| MSM0534 | NONE | | | NONE | | |
| MSM0535 | Msp_0466 | hypothetical protein | 7.1E−05 | NONE | | |
| MSM0536 | NONE | | | NONE | | |
| MSM0537 | NONE | | | NONE | | |
| MSM0538 | Msp_1324 | predicted glycyl radical activating | 5.1E−07 | MTH_1586 | pyruvate formate-lyase | 1.3E−05 |
| | | enzyme | | | activating enzyme | |
| MSM0539 | Msp_0219 | conserved hypothetical protein | 3.1E−04 | NONE | | |
| MSM0540 | NONE | | | NONE | | |
| MSM0541 | NONE | | | NONE | | |
| MSM0542 | Msp_1128 | F420-dependent N5,N10- | 3.4E−94 | NONE | coenzyme F420- | 1.4E−132 |
| | | methylenetetrahydromethanopterin | | | dependent N5,N10- | |
| | | reductase | | | methylene | |
| | | | | | tetrahydromethanopterin | |
| | | | | | reductase | |
| MSM0543 | Msp_0646 | predicted DNA repair photolyase | 9.3E−28 | NONE | | |
| MSM0544 | Msp_1127 | predicted Fe—S oxidoreductase | 4.4E−92 | MTH_1751 | conserved protein | 1.3E−90 |
| MSM0545 | NONE | | | NONE | | |
| MSM0546 | Msp_1046 | hypothetical membrane-spanning | 2.6E−23 | MTH_813 | unknown | 2.4E−27 |
| | | protein | | | | |
| MSM0547 | Msp_0324 | predicted nucleotidyltransferase | 1.6E−08 | MTH_1749 | unknown | 7.2E−81 |
| MSM0548 | Msp_1148 | predicted dinucleotide-utilizing | 4.4E−04 | MTH_1747 | conserved protein | 5.4E−37 |
| | | protein | | | | |
| MSM0549 | Msp_0830 | Trk-type potassium transport | 3.9E−04 | MTH_1746 | cytochrome C-type | 2.1E−28 |
| | | system, membrane protein | | | biogenesis protein | |
| MSM0550 | Msp_0656 | hypothetical membrane-spanning | 2.0E−04 | MTH_1745 | protein disulphide | 7.9E−20 |
| | | protein | | | isomerase | |
| MSM0551 | Msp_1124 | conserved hypothetical protein | 1.9E−68 | MTH_1744 | conserved protein | 2.4E−73 |
| MSM0552 | Msp_0330 | hypothetical protein | 4.6E−10 | MTH_1743 | unknown | 8.9E−12 |
| MSM0553 | Msp_0331 | predicted ATPase | 3.5E−92 | MTH_1742 | conserved protein | 1.2E−80 |
| MSM0554 | Msp_0161 | conserved hypothetical protein | 2.8E−74 | MTH_1815 | conserved protein | 2.6E−83 |
| MSM0555 | Msp_0192 | predicted MoxR-like ATPase | 3.9E−93 | MTH_1814 | conserved protein | 1.9E−87 |
| MSM0556 | Msp_0333 | predicted pterin-binding enzyme | 4.1E−121 | MTH_1741 | conserved protein | 1.1E−153 |
| MSM0557 | Msp_0334 | PorC | 2.1E−53 | NONE | pyruvate oxidoreductase, | 2.1E−65 |
| | | | | | gamma subunit | |
| MSM0558 | Msp_0335 | PorD | 4.3E−30 | NONE | pyruvate oxidoreductase, | 1.2E−32 |
| | | | | | gamma subunit | |
| MSM0559 | Msp_0336 | PorA | 2.1E−140 | NONE | pyruvate oxidoreductase, | 2.3E−148 |
| | | | | | alpha subunit | |
| MSM0560 | Msp_0337 | PorB | 1.8E−118 | NONE | pyruvate oxidoreductase, | 2.2E−127 |
| | | | | | beta subunit | |
| MSM0561 | Msp_1447 | EhbK | 8.6E−08 | NONE | formate hydrogenlyase, | 4.5E−40 |
| | | | | | iron-sulfur subunit I | |
| MSM0562 | Msp_1447 | EhbK | 4.0E−09 | NONE | formate hydrogenlyase, | 5.3E−14 |
| | | | | | iron-sulfur subunit 2 | |
| MSM0563 | Msp_0338 | fumarate hydratase | 3.3E−96 | NONE | fumarate hydratase, class I | 8.3E−96 |
| MSM0564 | Msp_0339 | predicted phosphate uptake | 4.8E−31 | MTH_1734 | phosphate transport | 2.8E−47 |
| | | regulator | | | system regulator | |
| MSM0565 | Msp_0340 | PstB | 4.0E−107 | MTH_1731 | phosphate transport | 1.5E−105 |
| | | | | | system ATP-binding | |
| MSM0566 | Msp_0341 | PstA | 1.3E−94 | MTH_1730 | phosphate transporter | 4.5E−111 |
| | | | | | permease PstC homolog | |
| MSM0567 | Msp_0342 | PstC | 7.0E−94 | MTH_1729 | phosphate transporter | 4.8E−100 |
| | | | | | permease PstC | |
| MSM0568 | Msp_0343 | PstS | 1.6E−64 | MTH_1727 | phosphate-binding protein | 2.7E−81 |
| | | | | | PstS | |
| MSM0569 | Msp_0344 | predicted phosphate uptake | 5.5E−62 | MTH_1724 | phosphate transport | 2.4E−82 |
| | | regulator | | | system regulator related | |
| | | | | | protein | |
| MSM0570 | Msp_0346 | conserved hypothetical | 5.2E−17 | MTH_1723 | unknown | 9.1E−26 |
| | | membrane-spanning protein | | | | |
| MSM0571 | NONE | | | MTH_1137 | conserved protein (FlpA) | 5.2E−165 |
| MSM0572 | NONE | | | NONE | H(2)-dependent N5,N10- | 2.4E−128 |
| | | | | | methylenetetrahydromethanopterin | |
| | | | | | dehydrogenase | |
| MSM0573 | Msp_0296 | CofG | 1.4E−15 | MTH_1143 | biotin synthetase (BioB) | 5.1E−112 |
| MSM0574 | NONE | | | MTH_1144 | conserved protein | 2.9E−38 |
| MSM0575 | Msp_1393 | conserved hypothetical | 8.5E−05 | MTH_1145 | conserved protein | 2.9E−38 |
| | | membrane-spanning protein | | | | |
| MSM0576 | NONE | | | MTH_1146 | conserved protein | 2.9E−38 |
| MSM0577 | NONE | | | MTH_1147 | conserved protein | 6.1E−52 |
| MSM0578 | NONE | | | MTH_1148 | conserved protein | 8.1E−34 |
| MSM0579 | Msp_1581 | partially conserved hypothetical | 7.5E−10 | MTH_1106 | ferredoxin | 1.3E−10 |
| | | protein | | | | |
| MSM0580 | Msp_0911 | member of asn/thr-rich large | 2.5E−05 | MTH_654 | unknown | 5.2E−39 |
| | | protein family | | | | |
| MSM0581 | Msp_0166 | conserved hypothetical | 3.9E−29 | MTH_655 | conserved protein | 6.7E−94 |
| | | membrane-spanning protein | | | | |
| MSM0582 | Msp_0737 | putative peptide methionine | 4.5E−122 | MTH_535 | peptide methionine | 2.4E−34 |
| | | sulfoxide reductase MsrA/MsrB | | | sulfoxide reductase | |
| MSM0583 | Msp_0655 | CbiM2 | 2.7E−69 | MTH_1707 | cobalamin biosynthesis | 1.5E−64 |
| | | | | | protein M | |
| MSM0584 | Msp_0656 | hypothetical membrane-spanning | 2.2E−12 | MTH_1706 | unknown | 3.4E−12 |
| | | protein | | | | |
| MSM0585 | Msp_0657 | CbiQ2 | 5.4E−55 | MTH_1705 | cobalt transport | 4.2E−60 |
| | | | | | membrane protein | |
| MSM0586 | Msp_0401 | CbiO1 | 7.6E−81 | MTH_1704 | cobalt transport ATP- | 1.2E−85 |
| | | | | | binding protein O | |
| MSM0587 | Msp_1438 | hypothetical protein | 5.9E−10 | NONE | | |
| MSM0588 | Msp_1441 | FeoA | 1.7E−12 | MTH_1362 | unknown | 2.4E−11 |
| MSM0589 | Msp_1440 | FeoB | 3.6E−200 | MTH_1361 | ferrous iron transport | 5.7E−152 |
| | | | | | protein B | |
| MSM0590 | NONE | | | NONE | | |
| MSM0591 | NONE | | | NONE | | |
| MSM0592 | Msp_0202 | conserved hypothetical | 2.3E−40 | MTH_230 | unknown | 1.2E−48 |
| | | membrane-spanning protein | | | | |
| MSM0593 | Msp_0610 | predicted ABC-type multidrug | 3.9E−77 | MTH_1487 | ABC transporter (ATP- | 2.0E−37 |
| | | transport system, ATP-binding | | | binding | |
| | | protein | | | | |
| MSM0594 | Msp_0609 | conserved hypothetical | 2.7E−44 | NONE | | |
| | | membrane-spanning protein | | | | |
| MSM0595 | Msp_0609 | conserved hypothetical | 1.8E−40 | NONE | | |
| | | membrane-spanning protein | | | | |
| MSM0596 | Msp_1163 | predicted type II secretion protein F | 3.0E−47 | MTH_1703 | unknown | 4.9E−59 |
| MSM0597 | Msp_1162 | predicted type II/IV secretion | 4.1E−121 | MTH_1702 | secretory protein kinase | 2.9E−157 |
| | | protein | | | | |
| MSM0598 | Msp_1161 | conserved hypothetical protein | 3.5E−44 | MTH_1701 | unknown | 5.6E−42 |
| MSM0599 | Msp_1160 | conserved hypothetical | 1.3E−94 | MTH_1700 | conserved protein | 8.9E−99 |
| | | membrane-spanning protein | | | | |
| MSM0600 | Msp_0512 | predicted transcriptional regulator | 7.9E−15 | MTH_313 | transcriptional regulator | 5.5E−12 |
| MSM0601 | Msp_0017 | conserved hypothetical protein | 1.7E−28 | NONE | | |
| MSM0602 | Msp_1159 | elongation factor 1-beta (aEF- | 2.2E−26 | MTH_1699 | translation elongation | 1.3E−28 |
| | | 1beta) (ef1B) | | | factor EF-1b | |
| MSM0603 | Msp_1158 | predicted Zn-ribbon RNA-binding | 4.7E−17 | MTH_1178 | conserved protein | 8.3E−04 |
| | | protein | | | | |
| MSM0604 | Msp_1157 | predicted amino acid kinase | 1.7E−42 | MTH_1698 | delta 1-pyrroline-5- | 6.2E−43 |
| | | | | | carboxylate synthetase | |
| MSM0605 | Msp_1156 | putative peptidyl-tRNA hydrolase | 1.5E−29 | MTH_1697 | conserved protein | 1.1E−36 |
| MSM0606 | NONE | | | NONE | | |
| MSM0607 | Msp_0613 | predicted ATPase | 4.1E−224 | MTH_1695 | RNase L inhibitor | 6.8E−227 |
| MSM0608 | NONE | | | NONE | | |
| MSM0609 | Msp_0147 | ferredoxin | 2.6E−04 | MTH_221 | unknown | 6.4E−25 |
| MSM0610 | Msp_0370 | putative aspartate | 8.5E−121 | MTH_1694 | aspartate | 9.6E−134 |
| | | aminotransferase | | | aminotransferase related | |
| | | | | | protein | |
| MSM0611 | Msp_0369 | RadB | 3.9E−61 | MTH_1693 | DNA repair protein Rad51 | 3.6E−63 |
| | | | | | homolog | |
| MSM0612 | Msp_0096 | conserved hypothetical protein | 1.9E−36 | MTH_1692 | conserved protein | 3.8E−43 |
| MSM0613 | Msp_0095 | predicted | 1.0E−46 | MTH_1691 | conserved protein | 4.3E−44 |
| | | phosphatidylglycerophosphate | | | | |
| | | synthase | | | | |
| MSM0614 | Msp_0094 | conserved hypothetical protein | 2.1E−14 | MTH_1690 | unknown | 1.7E−17 |
| MSM0615 | Msp_0675 | conserved hypothetical protein | 4.7E−159 | MTH_1686 | conserved protein | 7.7E−164 |
| MSM0616 | Msp_0440 | member of asn/thr-rich large | 1.1E−93 | MTH_716 | cell surface glycoprotein | 1.4E−14 |
| | | protein family | | | (s-layer protein) | |
| MSM0617 | Msp_0160 | Thil | 1.4E−102 | MTH_1685 | conserved protein | 1.1E−118 |
| MSM0618 | Msp_1489 | predicted potassium transport | 3.0E−09 | MTH_760 | Na+/H+-exchanging | 2.3E−16 |
| | | system, membrane component | | | protein:Na+/H+ antiporter | |
| MSM0619 | Msp_1262 | AlaS | 7.0E−300 | MTH_1683 | alanyl-tRNA synthetase | 1.5e−316 |
| MSM0620 | Msp_1263 | 50S ribosomal protein L12P | 1.9E−36 | MTH_1682 | ribosomal protein Lp1 | 9.4E−40 |
| MSM0621 | Msp_1264 | 50S ribosomal protein L10P | 5.3E−96 | MTH_1681 | ribosomal protein Lp0 | 2.7E−106 |
| | | | | | (E. coli) | |
| MSM0622 | Msp_1265 | 50S ribosomal protein L1P | 9.5E−74 | MTH_1680 | ribosomal protein L10a | 1.3E−81 |
| | | | | | (E. coli) | |
| MSM0623 | Msp_1266 | 50S ribosomal protein L11P | 1.3E−62 | MTH_1679 | ribosomal protein L12 | 2.2E−63 |
| | | | | | (E. coli) | |
| MSM0624 | Msp_1267 | putative transcription | 1.3E−46 | MTH_1678 | transcription termination | 1.1E−61 |
| | | antiterminator | | | factor NusG | |
| MSM0625 | Msp_1268 | partially conserved hypothetical | 1.3E−12 | MTH_1677 | protein translocation | 1.1E−13 |
| | | membrane-spanning protein | | | complex sec61 gamma | |
| | | | | | subunit related protein | |
| MSM0626 | Msp_1269 | FtsZ | 8.7E−135 | MTH_1676 | cell division protein FtsZ | 1.7E−143 |
| MSM0627 | Msp_0307 | MtrH | 8.5E−105 | MTH_1156 | N5-methyl- | 3.7E−116 |
| | | | | | tetrahydromethanopterin: | |
| | | | | | coenzyme M | |
| | | | | | methyltransferase, | |
| | | | | | subunit H | |
| MSM0628 | NONE | | | MTH_1675 | conserved protein | 7.2E−49 |
| MSM0629 | Msp_0017 | conserved hypothetical protein | 1.7E−28 | NONE | | |
| MSM0630 | Msp_1271 | conserved hypothetical protein | 7.1E−69 | MTH_1670 | conserved protein | 4.2E−76 |
| MSM0631 | Msp_1272 | predicted transcription initiation | 3.4E−37 | MTH_1669 | conserved protein | 4.6E−47 |
| | | factor IIE, alpha subunit | | | | |
| MSM0632 | Msp_1273 | conserved hypothetical protein | 6.2E−38 | MTH_1668 | conserved protein | 1.7E−40 |
| MSM0633 | Msp_1063 | predicted RNA-binding protein | 9.2E−92 | MTH_1665 | conserved protein | 6.9E−92 |
| MSM0634 | Msp_1064 | conserved hypothetical protein | 1.8E−24 | MTH_1664 | conserved protein | 6.2E−27 |
| MSM0635 | Msp_1069 | predicted regulator of aminoacid | 1.6E−41 | MTH_1654 | unknown | 1.8E−45 |
| | | metabolism | | | | |
| MSM0636 | Msp_1067 | hypothetical protein | 1.6E−23 | MTH_1649 | hydrogenase | 1.2E−25 |
| | | | | | expression/formation | |
| | | | | | protein HypC | |
| MSM0637 | Msp_1077 | predicted dihydrolipoamide | 2.4E−93 | MTH_1648 | dihydrolipoamide | 1.2E−92 |
| | | dehydrogenase-related protein | | | dehydrogenase | |
| MSM0638 | Msp_1343 | hypothetical membrane-spanning | 2.6E−78 | MTH_1646 | unknown | 5.9E−54 |
| | | multicopy protein A 3 | | | | |
| MSM0639 | Msp_1080 | conserved hypothetical | 4.5E−67 | MTH_1644 | unknown | 1.8E−52 |
| | | membrane-spanning protein | | | | |
| MSM0640 | Msp_1081 | predicted release factor aRF1 | 2.2E−106 | MTH_1642 | cell division protein | 9.6E−118 |
| MSM0641 | Msp_1083 | putative prephenate | 4.4E−92 | MTH_1640 | chorismate mutase | 1.8E−100 |
| | | dehydrogenase | | | | |
| MSM0642 | Msp_1084 | CdcH | 9.3E−273 | MTH_1639 | cell division control | 4.7E−299 |
| | | | | | protein Cdc48 | |
| MSM0643 | Msp_0227 | conserved hypothetical protein | 3.3E−71 | MTH_1574 | conserved protein | 5.2E−78 |
| MSM0644 | Msp_0228 | ThiC1 | 1.2E−144 | MTH_1576 | thiamine biosynthesis | 3.2E−158 |
| | | | | | protein | |
| MSM0645 | Msp_0258 | ATP-dependent DNA ligase | 1.1E−148 | MTH_1580 | DNA ligase | 3.9E−176 |
| MSM0646 | Msp_0504 | conserved hypothetical | 5.5E−30 | NONE | | |
| | | membrane-spanning protein | | | | |
| MSM0647 | Msp_0259 | hypothetical protein | 3.8E−15 | MTH_1581 | conserved protein | 4.8E−20 |
| MSM0648 | Msp_0263 | predicted phosphomannomutase | 1.2E−169 | MTH_1584 | phosphomannomutase | 9.9E−171 |
| MSM0649 | Msp_0970 | hypothetical membrane-spanning | 3.5E−44 | MTH_559 | conserved protein | 1.0E−06 |
| | | protein | | | | |
| MSM0650 | Msp_0971 | hypothetical protein | 1.2E−36 | MTH_1787 | conserved protein | 1.3E−07 |
| MSM0651 | Msp_1323 | conserved hypothetical protein | 1.5E−98 | MTH_1585 | O-linked GlcNAc | 1.9E−105 |
| | | | | | transferase | |
| MSM0652 | Msp_1324 | predicted glycyl radical activating | 6.3E−45 | MTH_1586 | pyruvate formate-lyase | 1.5E−50 |
| | | enzyme | | | activating enzyme | |
| MSM0653 | Msp_1326 | HisC | 2.5E−112 | MTH_1587 | histidinol-phosphate | 1.2E−119 |
| | | | | | aminotransferase | |
| MSM0654 | Msp_1325 | predicted carbonic | 1.8E−47 | MTH_1588 | ferripyochelin binding | 4.6E−47 |
| | | anhydrase/acetyltransferase | | | protein | |
| MSM0655 | Msp_1301 | predicted nucleoside- | 3.0E−134 | MTH_1589 | glucose-1-phosphate | 8.1E−137 |
| | | diphosphate-sugar | | | thymidylyltransferase | |
| | | pyrophosphorylase | | | homolog | |
| MSM0656 | Msp_1300 | predicted phosphomannomutase | 9.7E−136 | MTH_1590 | phosphomannomutase | 7.6E−141 |
| MSM0657 | Msp_1299 | ApgM2 | 6.1E−150 | MTH_1591 | phosphonopyruvate | 6.0E−148 |
| | | | | | decarboxylase | |
| MSM0658 | NONE | | | NONE | | |
| MSM0659 | Msp_1298 | conserved hypothetical | 4.8E−63 | MTH_1592 | conserved protein | 1.1E−77 |
| | | membrane-spanning protein | | | | |
| MSM0660 | Msp_1568 | conserved hypothetical | 3.9E−52 | NONE | | |
| | | membrane-spanning protein | | | | |
| MSM0661 | Msp_1297 | 30S ribosomal protein S3Ae | 3.2E−66 | MTH_1593 | ribosomal protein S3a | 8.4E−71 |
| MSM0662 | Msp_0712 | hypothetical membrane-spanning | 8.9E−07 | NONE | | |
| | | protein | | | | |
| MSM0663 | Msp_1295 | predicted iron-molybdenum | 1.4E−08 | MTH_1594 | conserved protein | 1.2E−16 |
| | | cluster-binding protein | | | | |
| MSM0664 | Msp_0540 | predicted multimeric flavodoxin | 2.4E−22 | MTH_1595 | conserved protein | 5.0E−57 |
| MSM0665 | Msp_0642 | predicted purine nucleoside | 7.4E−74 | MTH_1596 | methylthioadenosine | 3.7E−77 |
| | | phosphorylase | | | phosphorylase | |
| MSM0666 | Msp_0641 | conserved hypothetical | 6.7E−176 | MTH_1597 | conserved protein | 3.5E−184 |
| | | membrane-spanning protein | | | | |
| MSM0667 | Msp_0587 | hypothetical membrane-spanning | 1.8E−05 | MTH_520 | unknown | 3.7E−13 |
| | | protein | | | | |
| MSM0668 | Msp_0637 | conserved hypothetical protein | 4.9E−22 | MTH_1598 | conserved protein | 5.8E−40 |
| MSM0669 | NONE | | | NONE | | |
| MSM0670 | NONE | | | NONE | | |
| MSM0671 | Msp_0635 | cell division control protein 6-like 2 | 2.7E−108 | MTH_1599 | Cdc6 related protein | 5.4E−131 |
| MSM0672 | Msp_0661 | conserved hypothetical protein | 1.4E−56 | MTH_1600 | conserved protein | 7.0E−67 |
| MSM0673 | Msp_1557 | conserved hypothetical | 5.1E−27 | NONE | | |
| | | membrane-spanning protein | | | | |
| MSM0674 | NONE | | | NONE | | |
| MSM0675 | NONE | | | NONE | | |
| MSM0676 | Msp_1557 | conserved hypothetical | 9.7E−33 | NONE | | |
| | | membrane-spanning protein | | | | |
| MSM0677 | Msp_0662 | putative aspartate | 1.3E−131 | MTH_1601 | aspartate | 7.3E−136 |
| | | aminotransferase | | | aminotransferase | |
| MSM0678 | Msp_0505 | conserved hypothetical | 8.1E−29 | MTH_519 | unknown | 1.1E−20 |
| | | membrane-spanning protein | | | | |
| MSM0679 | Msp_0587 | hypothetical membrane-spanning | 8.1E−12 | MTH_520 | unknown | 8.1E−34 |
| | | protein | | | | |
| MSM0680 | Msp_0757 | predicted ATPase | 2.4E−109 | NONE | | |
| MSM0681 | NONE | | | NONE | | |
| MSM0682 | NONE | | | NONE | | |
| MSM0683 | Msp_0380 | hypothetical protein | 3.1E−13 | MTH_626 | unknown | 9.7E−22 |
| MSM0684 | Msp_0381 | hypothetical membrane-spanning | 1.2E−09 | MTH_625 | unknown | 1.5E−04 |
| | | protein | | | | |
| MSM0685 | NONE | | | NONE | | |
| MSM0686 | Msp_0605 | predicted thiamine | 2.1E−94 | NONE | acetolactate synthase, | 8.5E−94 |
| | | pyrophosphate-requiring enzyme | | | large subunit homolog | |
| MSM0687 | Msp_0604 | predicted deoxycytidine | 1.6E−57 | MTH_1605 | deoxycytidine- | 8.2E−57 |
| | | triphosphate deaminase | | | triphosphate deaminase | |
| | | | | | related protein | |
| MSM0688 | Msp_1409 | predicted tautomerase | 3.2E−11 | MTH_1606 | unknown | 1.7E−08 |
| MSM0689 | NONE | | | NONE | | |
| MSM0690 | Msp_0767 | predicted helicase | 2.1E−243 | NONE | ATP-dependent RNA | 9.5E−09 |
| | | | | | helicase, eIF-4A family | |
| MSM0691 | Msp_0006 | predicted NUDIX-related protein | 1.4E−40 | MTH_1336 | mutator MutT protein | 4.1E−14 |
| | | | | | homolog | |
| MSM0692 | NONE | | | NONE | | |
| MSM0693 | Msp_0113 | conserved hypothetical protein | 1.4E−13 | MTH_540 | intracellular protein | 7.2E−10 |
| | | | | | transport protein | |
| MSM0694 | NONE | | | NONE | | |
| MSM0695 | Msp_0767 | predicted helicase | 1.0E−13 | NONE | ATP-dependent RNA | 3.7E−10 |
| | | | | | helicase, eIF-4A family | |
| MSM0696 | Msp_1095 | DNA double-strand break repair | 4.0E−04 | NONE | | |
| | | protein Rad50 | | | | |
| MSM0697 | NONE | | | NONE | | |
| MSM0698 | NONE | | | NONE | | |
| MSM0699 | Msp_0738 | predicted Na+-dependent | 4.1E−137 | MTH_1909 | unknown | 5.8E−04 |
| | | transporter | | | | |
| MSM0700 | Msp_0921 | putative poly-gamma-glutamate | 1.0E−108 | NONE | | |
| | | biosynthesis protein | | | | |
| MSM0701 | Msp_0601 | partially conserved hypothetical | 2.4E−116 | MTH_1608 | signal recognition particle | 3.6E−111 |
| | | protein, predicted GTPase | | | protein (docking protein) | |
| MSM0702 | Msp_0600 | conserved hypothetical protein | 1.5E−20 | MTH_1609 | conserved protein | 1.1E−36 |
| MSM0703 | Msp_0599 | RplX | 4.1E−18 | MTH_1610 | ribosomal protein L18a | 1.0E−17 |
| MSM0704 | Msp_0598 | translation initiation factor 6 (aIF- | 3.7E−56 | MTH_1611 | conserved protein | 3.8E−59 |
| | | 6) | | | | |
| MSM0705 | Msp_0597 | 50S ribosomal protein L31e | 1.4E−22 | MTH_1612 | ribosomal protein L31 | 4.7E−29 |
| MSM0706 | NONE | | | MTH_1613 | ribosomal protein L39 | 1.2E−16 |
| MSM0707 | Msp_0596 | predicted subunit of tRNA | 2.8E−58 | MTH_1614 | conserved protein | 3.8E−59 |
| | | methyltransferase | | | | |
| MSM0708 | Msp_0595 | partially conserved hypothetical | 1.4E−31 | MTH_1615 | conserved protein | 3.1E−32 |
| | | protein | | | | |
| MSM0709 | Msp_0594 | 30S ribosomal protein S19e | 1.5E−52 | MTH_1616 | ribosomal protein S19 | 5.9E−54 |
| MSM0710 | Msp_0593 | hypothetical protein | 1.3E−28 | MTH_1617 | conserved protein | 1.3E−19 |
| MSM0711 | Msp_0592 | putative ribonuclease P, subunit 4 | 8.7E−32 | MTH_1618 | conserved protein | 3.0E−34 |
| MSM0712 | NONE | | | NONE | | |
| MSM0713 | Msp_0589 | predicted nucleotide kinase | 3.1E−36 | MTH_1619 | conserved protein | 2.4E−34 |
| | | | | | (adenylate kinase | |
| | | | | | related) | |
| MSM0714 | Msp_0660 | predicted GTPase | 2.1E−46 | NONE | GTP-binding protein, | 3.9E−50 |
| | | | | | GTP1/OBG family | |
| MSM0715 | Msp_0660 | predicted GTPase | 2.4E−77 | NONE | GTP-binding protein, | 1.2E−87 |
| | | | | | GTP1/OBG family | |
| MSM0716 | Msp_0368 | conserved hypothetical | 1.1E−141 | MTH_1623 | oligosaccharyl | 7.3E−88 |
| | | membrane-spanning protein | | | transferase STT3 subunit | |
| | | | | | related protein | |
| MSM0717 | Msp_0366 | TopA | 8.0E−228 | MTH_1624 | DNA topoisomerase I | 3.1E−247 |
| MSM0718 | NONE | | | MTH_1625 | unknown | 4.6E−15 |
| MSM0719 | Msp_1096 | putative phosphoserine | 2.7E−124 | MTH_1626 | phosphoserine | 1.3E−83 |
| | | phosphatase | | | phosphatase | |
| MSM0720 | Msp_1097 | TATA-box binding protein | 5.0E−68 | MTH_1627 | TATA-binding | 1.2E−73 |
| | | | | | transcription initiation | |
| | | | | | factor | |
| MSM0721 | Msp_1098 | predicted adenylate cyclase | 2.6E−39 | MTH_1629 | conserved protein | 1.3E−42 |
| MSM0722 | Msp_1099 | LeuA2 | 1.9E−91 | MTH_1630 | 2-isopropylmalate | 1.5E−151 |
| | | | | | synthase | |
| MSM0723 | Msp_1100 | LeuC2 | 2.7E−140 | NONE | 3-isopropylmalate | 5.8E−150 |
| | | | | | dehydratase, LeuC | |
| | | | | | subunit | |
| MSM0724 | Msp_0326 | hypothetical protein | 9.1E−04 | MTH_1632 | conserved protein | 1.0E−40 |
| MSM0725 | Msp_1086 | flap structure-specific | 9.2E−92 | MTH_1633 | DNA repair protein Rad2 | 7.8E−100 |
| | | endonuclease | | | | |
| MSM0726 | NONE | | | MTH_1635 | conserved protein | 7.1E−42 |
| MSM0727 | Msp_1085 | AhcY | 1.3E−163 | MTH_1636 | S-adenosylhomocysteine | 3.7E−164 |
| | | | | | hydrolase | |
| MSM0728 | Msp_0524 | predicted oxidoreductase | 4.4E−92 | MTH_907 | conserved protein | 2.5E−62 |
| MSM0729 | Msp_0231 | predicted E1-like enzyme | 2.1E−46 | MTH_1571 | molybdopterin | 1.7E−65 |
| | | | | | biosynthesis protein | |
| | | | | | MoeB homolog | |
| MSM0730 | Msp_0017 | conserved hypothetical protein | 1.7E−28 | NONE | | |
| MSM0731 | Msp_0113 | conserved hypothetical protein | 1.6E−13 | MTH_511 | DNA helicase II | 4.6E−07 |
| MSM0732 | Msp_0873 | TruB | 3.2E−105 | MTH_32 | centromere/microtubule- | 3.2E−110 |
| | | | | | binding protein | |
| MSM0733 | Msp_0880 | 50S ribosomal protein L14e | 2.3E−24 | MTH_31 | ribosomal protein L14 | 4.1E−23 |
| MSM0734 | Msp_0881 | putative cytidylate kinase | 1.8E−56 | MTH_30 | cytidylate kinase | 3.8E−52 |
| MSM0735 | Msp_0882 | 50S ribosomal protein L34e | 2.4E−29 | MTH_29 | ribosomal protein L34 | 3.3E−37 |
| | | | | | (E. coli) | |
| MSM0736 | Msp_0883 | hypothetical membrane-spanning | 1.2E−34 | MTH_28 | conserved protein | 1.1E−50 |
| | | protein | | | | |
| MSM0737 | Msp_0884 | AdkA | 1.1E−61 | MTH_27 | adenylate kinase | 1.1E−63 |
| MSM0738 | Msp_0885 | SecY | 6.6E−153 | MTH_26 | preprotein translocase | 1.0E−145 |
| | | | | | SecY | |
| MSM0739 | Msp_0886 | 50S ribosomal protein L15P | 1.9E−43 | MTH_25 | ribosomal protein L27a | 4.1E−46 |
| | | | | | (E. coli) | |
| MSM0740 | Msp_0887 | 50S ribosomal protein L30P | 9.7E−49 | MTH_24 | ribosomal protein L7 | 1.2E−53 |
| | | | | | (E. coli) | |
| MSM0741 | Msp_0888 | 30S ribosomal protein S5P | 3.5E−92 | MTH_23 | ribosomal protein S2 | 3.7E−93 |
| | | | | | (E. coli) | |
| MSM0742 | Msp_0889 | 50S ribosomal protein L18P | 6.7E−57 | MTH_22 | ribosomal protein L5 | 8.9E−67 |
| MSM0743 | Msp_0890 | 50S ribosomal protein L19e | 4.6E−58 | MTH_21 | ribosomal protein L19 | 1.5E−64 |
| MSM0744 | Msp_0891 | 50S ribosomal protein L32e | 6.6E−34 | MTH_20 | ribosomal protein L32 | 3.1E−41 |
| MSM0745 | Msp_0892 | 50S ribosomal protein L6P | 5.7E−60 | MTH_19 | ribosomal protein L9 | 4.3E−67 |
| | | | | | (E. coli) | |
| MSM0746 | Msp_0893 | 30S ribosomal protein S8P | 9.5E−58 | MTH_18 | ribosomal protein S15a | 1.2E−55 |
| | | | | | (E. coli) | |
| MSM0747 | Msp_0894 | 30S ribosomal protein S14P | 2.1E−21 | MTH_17 | ribosomal protein S29 | 7.6E−22 |
| | | | | | (E. coli) | |
| MSM0748 | Msp_0895 | 50S ribosomal protein L5P | 2.4E−61 | MTH_16 | ribosomal protein L11 | 2.9E−61 |
| | | | | | (E. coli) | |
| MSM0749 | Msp_0896 | 30S ribosomal protein S4e | 3.0E−70 | MTH_15 | ribosomal protein S4 | 1.8E−77 |
| MSM0750 | Msp_0897 | 50S ribosomal protein L24P | 2.4E−29 | MTH_14 | ribosomal protein L26 | 1.3E−35 |
| | | | | | (E. coli) | |
| MSM0751 | Msp_0898 | 50S ribosomal protein L14P | 1.4E−56 | MTH_13 | ribosomal protein L23 | 1.0E−56 |
| | | | | | (E. coli) | |
| MSM0752 | Msp_0899 | 30S ribosomal protein S17P | 1.4E−42 | MTH_12 | ribosomal protein S11 | 1.4E−45 |
| | | | | | (E. coli) | |
| MSM0753 | Msp_0900 | putative ribonuclease P, | 4.8E−24 | MTH_11 | conserved protein | 8.7E−21 |
| | | component 1 | | | | |
| MSM0754 | Msp_0901 | protein translation factor SUI1-like | 2.4E−45 | MTH_10 | ribosomal protein SUI1 | 3.6E−47 |
| | | protein | | | | |
| MSM0755 | Msp_0902 | 50S ribosomal protein L29P | 3.3E−16 | MTH_9 | ribosomal protein L35 | 7.9E−20 |
| | | | | | (E. coli) | |
| MSM0756 | Msp_0903 | 30S ribosomal protein S3P | 6.8E−96 | MTH_8 | ribosomal protein S3 | 1.2E−96 |
| | | | | | (E. coli) | |
| MSM0757 | Msp_0904 | 50S ribosomal protein L22P | 1.3E−46 | MTH_7 | ribosomal protein L17 | 3.5E−56 |
| | | | | | (E. coli) | |
| MSM0758 | Msp_0905 | 30S ribosomal protein S19P | 1.4E−58 | MTH_6 | ribosomal protein S15 | 1.3E−58 |
| | | | | | (E. coli) | |
| MSM0759 | Msp_0906 | 50S ribosomal protein L2P | 3.1E−107 | MTH_5 | ribosomal protein L8 | 1.9E−105 |
| | | | | | (E. coli) | |
| MSM0760 | Msp_0907 | 50S ribosomal protein L23P | 2.8E−26 | MTH_4 | ribosomal protein L23a | 5.4E−28 |
| | | | | | (E. coli) | |
| MSM0761 | Msp_0908 | 50S ribosomal protein L1e | 4.5E−99 | MTH_3 | ribosomal protein L4 | 2.6E−99 |
| | | | | | (E. coli) | |
| MSM0762 | Msp_0909 | 50S ribosomal protein L3P | 1.5E−121 | MTH_2 | ribosomal protein L3 | 1.1E−132 |
| | | | | | (E. coli) | |
| MSM0763 | Msp_0910 | conserved hypothetical protein | 1.1E−79 | MTH_1 | conserved protein | 1.2E−73 |
| MSM0764 | Msp_1319 | predicted DNA modification | 1.7E−04 | MTH_1918 | possible protein | 3.7E−45 |
| | | methylase | | | methyltransferase | |
| MSM0765 | Msp_0914 | PycA | 1.7E−186 | MTH_1917 | biotin carboxylase | 5.5E−202 |
| MSM0766 | Msp_0915 | partially conserved hypothetical | 4.0E−36 | MTH_1916 | biotin acetyl-CoA | 5.3E−62 |
| | | protein | | | carboxylase ligase/biotin | |
| | | | | | operon repressor | |
| MSM0767 | Msp_0916 | predicted selenocysteine | 2.8E−99 | MTH_1914 | conserved protein | 2.3E−100 |
| | | synthase | | | | |
| MSM0768 | Msp_0917 | hypothetical protein | 7.5E−04 | MTH_1912 | unknown | 1.1E−11 |
| MSM0769 | Msp_0791 | fumarate hydratase | 3.1E−59 | NONE | fumarate hydratase, class | 1.5E−50 |
| | | | | | I related protein | |
| MSM0770 | Msp_1112 | CbiO2 | 1.2E−43 | NONE | methyl coenzyme M | 8.3E−64 |
| | | | | | reductase system, | |
| | | | | | component A2 homolog | |
| MSM0771 | Msp_0657 | CbiQ2 | 1.4E−05 | MTH_453 | conserved protein | 2.6E−12 |
| MSM0772 | NONE | | | MTH_452 | unknown | 9.2E−07 |
| MSM0773 | Msp_0958 | predicted ABC-type polar amino | 1.4E−26 | MTH_1704 | cobalt transport ATP- | 5.9E−25 |
| | | acid transport system, ATP- | | | binding protein O | |
| | | binding protein | | | | |
| MSM0774 | Msp_0340 | PstB | 1.6E−26 | MTH_1731 | phosphate transport | 5.2E−26 |
| | | | | | system ATP-binding | |
| MSM0775 | Msp_0149 | predicted transcriptional regulator | 2.0E−34 | NONE | | |
| MSM0776 | Msp_0790 | conserved hypothetical | 2.2E−138 | MTH_1909 | unknown | 2.8E−159 |
| | | membrane-spanning protein | | | | |
| MSM0777 | Msp_0491 | hypothetical membrane-spanning | 3.6E−10 | MTH_1908 | unknown | 3.2E−16 |
| | | protein | | | | |
| MSM0778 | Msp_0517 | predicted RNA-binding protein | 3.6E−184 | MTH_1907 | conserved protein | 2.0E−188 |
| MSM0779 | Msp_0516 | predicted Zn-dependent | 2.3E−70 | MTH_1902 | conserved protein | 3.5E−72 |
| | | hydrolase of the beta-lactamase | | | | |
| | | superfamily | | | | |
| MSM0780 | NONE | | | MTH_1901 | unknown | 2.9E−16 |
| MSM0781 | Msp_1151 | hypothetical membrane-spanning | 1.2E−09 | MTH_1533 | unknown | 1.3E−10 |
| | | protein | | | | |
| MSM0782 | Msp_1151 | hypothetical membrane-spanning | 2.4E−04 | MTH_979 | unknown | 1.2E−05 |
| | | protein | | | | |
| MSM0783 | Msp_1447 | EhbK | 3.3E−20 | NONE | tungsten | 3.5E−88 |
| | | | | | formylmethanofuran | |
| | | | | | dehydrogenase, subunit | |
| | | | | | F homolog | |
| MSM0784 | Msp_0236 | ferredoxin | 5.5E−14 | MTH_927 | ferredoxin | 5.1E−16 |
| MSM0785 | Msp_0514 | putative phosphopantetheine | 1.0E−37 | MTH_1896 | conserved protein | 1.3E−42 |
| | | adenylyltransferase | | | | |
| MSM0786 | Msp_1129 | partially conserved hypothetical | 1.1E−49 | MTH_412 | conserved protein | 1.3E−69 |
| | | membrane-spanning protein | | | | |
| MSM0787 | Msp_0511 | predicted Fe—S oxidoreductase | 7.6E−120 | MTH_1895 | conserved protein | 8.7E−124 |
| MSM0788 | Msp_0510 | putative aspartate | 5.5E−117 | MTH_1894 | aspartate | 3.3E−108 |
| | | aminotransferase | | | aminotransferase | |
| | | | | | homolog | |
| MSM0789 | Msp_0519 | predicted Co/Zn/Cd cation | 7.6E−33 | MTH_1893 | cation efflux system | 1.8E−77 |
| | | transporter | | | protein (zinc/cadmium) | |
| MSM0790 | Msp_1428 | conserved hypothetical protein | 1.3E−15 | MTH_1884 | conserved protein | 3.0E−36 |
| MSM0791 | Msp_0443 | 2-phosphoglycerate kinase | 3.6E−81 | MTH_1883 | 2-phosphoglycerate | 3.7E−84 |
| | | | | | kinase | |
| MSM0792 | Msp_1010 | predicted phosphoesterase | 1.8E−47 | MTH_1882 | conserved protein | 2.3E−52 |
| MSM0793 | Msp_1011 | conserved hypothetical protein | 1.9E−29 | MTH_1881 | conserved protein | 4.4E−42 |
| MSM0794 | Msp_1012 | conserved hypothetical protein | 1.9E−20 | MTH_1880 | conserved protein | 2.1E−28 |
| MSM0795 | Msp_1013 | HdrB1 | 1.9E−116 | NONE | heterodisulfide reductase, | 4.3E−115 |
| | | | | | subunit B | |
| MSM0796 | Msp_1014 | HdrC1 | 1.6E−69 | NONE | heterodisulfide reductase, | 4.7E−77 |
| | | | | | subunit C | |
| MSM0797 | Msp_1015 | conserved hypothetical protein | 2.5E−50 | MTH_1877 | conserved protein | 1.6E−53 |
| MSM0798 | NONE | | | NONE | | |
| MSM0799 | Msp_0113 | conserved hypothetical protein | 1.6E−12 | MTH_1626 | phosphoserine | 2.2E−06 |
| | | | | | phosphatase | |
| MSM0800 | NONE | | | NONE | | |
| MSM0801 | Msp_1017 | DphB | 1.7E−74 | MTH_1874 | diphthine synthase | 2.9E−77 |
| MSM0802 | Msp_1022 | predicted methyltransferase | 3.6E−81 | MTH_1873 | met-10+ protein | 1.3E−74 |
| MSM0803 | NONE | | | MTH_633 | conserved protein | 4.3E−04 |
| MSM0804 | Msp_1023 | putative translation initiation factor | 5.0E−100 | NONE | translation initiation factor | 2.2E−125 |
| | | aIF-2B, subunit 1 | | | eIF-2B, alpha subunit | |
| MSM0805 | Msp_0958 | predicted ABC-type polar amino | 5.0E−100 | MTH_696 | ABC transporter | 2.7E−35 |
| | | acid transport system, ATP- | | | (glutamine transport ATP- | |
| | | binding protein | | | binding protein) | |
| MSM0806 | Msp_0959 | predicted ABC-type polar amino | 2.1E−92 | NONE | | |
| | | acid transport system, permease | | | | |
| | | protein | | | | |
| MSM0807 | Msp_0960 | predicted ABC-type polar amino | 3.5E−108 | NONE | | |
| | | acid transport system, periplasmic | | | | |
| | | substrate-binding protein | | | | |
| MSM0808 | Msp_1024 | conserved hypothetical protein | 2.9E−104 | MTH_1871 | nitrogenase iron- | 1.6E−115 |
| | | | | | molybdenum cofactor | |
| | | | | | biosynthesis protein NifB | |
| MSM0809 | Msp_1025 | conserved hypothetical protein | 2.3E−40 | MTH_1870 | conserved protein | 3.1E−41 |
| MSM0810 | Msp_1026 | predicted activator of 2- | 5.5E−165 | MTH_1869 | activator of (R)-2- | 1.7E−175 |
| | | hydroxyglutaryl-CoA dehydratase | | | hydroxyglutaryl-CoA | |
| MSM0811 | Msp_1027 | conserved hypothetical protein | 1.7E−53 | MTH_1868 | conserved protein | 1.2E−57 |
| MSM0812 | Msp_1029 | conserved hypothetical protein | 1.3E−39 | MTH_1866 | conserved protein | 1.0E−40 |
| MSM0813 | Msp_1030 | predicted peptidyl-prolyl cis-trans | 2.6E−135 | MTH_1865 | conserved protein | 2.3E−146 |
| | | isomerase | | | | |
| MSM0814 | Msp_1032 | predicted selenophosphate | 3.3E−87 | MTH_1864 | phosphoribosylformylglycinamidine | 6.2E−91 |
| | | synthetase-related protein | | | synthase II | |
| | | | | | related protein | |
| MSM0815 | Msp_1033 | conserved hypothetical protein | 4.5E−99 | MTH_1863 | conserved protein | 4.4E−97 |
| MSM0816 | Msp_1034 | predicted nucleic acid-binding | 3.7E−33 | MTH_1862 | conserved protein | 3.5E−40 |
| | | protein | | | | |
| MSM0817 | Msp_0799 | predicted transcriptional regulator | 6.6E−34 | MTH_1843 | unknown | 1.0E−33 |
| MSM0818 | Msp_0798 | predicted transcriptional regulator | 5.0E−36 | MTH_1843 | unknown | 2.1E−26 |
| MSM0819 | NONE | | | MTH_1438 | unknown | 4.6E−15 |
| MSM0820 | NONE | | | MTH_1861 | molybdenum cofactor | 2.5E−46 |
| | | | | | biosynthesis MoaB | |
| MSM0821 | Msp_1036 | PyrE | 3.1E−59 | MTH_1860 | uridine 5′- | 5.2E−55 |
| | | | | | monophosphate synthase | |
| MSM0822 | Msp_1035 | hypothetical protein | 3.1E−13 | MTH_1859 | unknown | 1.4E−15 |
| MSM0823 | NONE | | | NONE | | |
| MSM0824 | NONE | | | NONE | N-terminal | 3.1E−06 |
| | | | | | acetyltransferase | |
| | | | | | complex, subunit ARD1 | |
| MSM0825 | Msp_0437 | conserved hypothetical protein | 4.7E−56 | NONE | | |
| MSM0826 | Msp_0114 | ThsB | 8.2E−226 | MTH_794 | chaperonin | 2.4E−231 |
| MSM0827 | Msp_0747 | member of asn/thr-rich large | 5.9E−04 | MTH_796 | conserved protein | 4.5E−33 |
| | | protein family | | | | |
| MSM0828 | Msp_0220 | predicted glycosyltransferase | 2.0E−14 | MTH_540 | intracellular protein | 8.1E−06 |
| | | | | | transport protein | |
| MSM0829 | Msp_0110 | aspartate-semialdehyde | 6.6E−121 | MTH_799 | aspartate-semialdehyde | 2.3E−132 |
| | | dehydrogenase | | | dehydrogenase | |
| MSM0830 | Msp_0109 | DapB | 1.0E−85 | MTH_800 | dihydrodipicolinate | 3.2E−87 |
| | | | | | reductase | |
| MSM0831 | Msp_0108 | DapA | 4.9E−86 | MTH_801 | dihydrodipicolinate | 2.0E−85 |
| | | | | | synthase | |
| MSM0832 | Msp_0107 | putative aspartokinase | 2.2E−129 | MTH_802 | aspartokinase II alpha | 6.7E−149 |
| | | | | | subunit | |
| MSM0833 | Msp_0106 | 30S ribosomal protein S17e | 1.3E−19 | MTH_803 | ribosomal protein S17 | 1.5E−23 |
| MSM0834 | Msp_0105 | putative chorismate mutase | 3.8E−15 | NONE | chorismate mutase, | 9.3E−17 |
| | | | | | subunit A | |
| MSM0835 | Msp_0104 | AroK | 4.7E−56 | MTH_805 | conserved protein | 2.6E−76 |
| | | | | | (homoserine kinase | |
| | | | | | related) | |
| MSM0836 | Msp_0101 | predicted glycosyltransferase | 2.6E−64 | MTH_450 | LPS biosynthesis RfbU | 9.6E−31 |
| | | | | | related protein | |
| MSM0837 | Msp_0102 | CbiD | 6.5E−91 | MTH_808 | cobalamin biosynthesis | 4.0E−87 |
| | | | | | protein D | |
| MSM0838 | Msp_0103 | putative thioredoxin | 2.5E−18 | MTH_807 | thioredoxin | 7.1E−19 |
| MSM0839 | Msp_0100 | predicted helicase | 2.1E−227 | MTH_810 | DNA helicase related | 9.1E−248 |
| | | | | | protein | |
| MSM0840 | Msp_0097 | conserved hypothetical protein | 3.0E−15 | MTH_814 | conserved protein | 1.6E−14 |
| MSM0841 | Msp_0371 | hypothetical protein | 6.6E−11 | MTH_815 | unknown | 2.2E−15 |
| MSM0842 | Msp_0372 | predicted histone | 1.5E−187 | MTH_817 | conserved protein | 6.2E−189 |
| | | acetyltransferase | | | | |
| MSM0843 | NONE | | | MTH_818 | deoxyribose-phosphate | 2.1E−26 |
| | | | | | aldolase | |
| MSM0844 | Msp_0122 | archaeal histone | 3.5E−21 | MTH_821 | histone HMtA1 | 2.5E−23 |
| MSM0845 | Msp_0376 | predicted 2-methylthioadenine | 8.9E−126 | MTH_826 | conserved protein | 3.8E−130 |
| | | synthetase | | | | |
| MSM0846 | Msp_0375 | conserved hypothetical protein | 1.6E−39 | MTH_828 | conserved protein | 1.6E−46 |
| MSM0847 | Msp_0374 | LeuD2 | 4.1E−57 | NONE | 3-isopropylmalate | 7.4E−56 |
| | | | | | dehydratase, LeuD | |
| | | | | | subunit | |
| MSM0848 | Msp_0373 | predicted archaeal sugar kinase | 1.5E−73 | MTH_830 | conserved protein | 3.0E−82 |
| MSM0849 | Msp_0384 | predicted Fe—S oxidoreductase | 6.6E−169 | MTH_831 | molybdenum cofactor | 2.7E−177 |
| | | | | | biosynthesis MoaA | |
| | | | | | homolog | |
| MSM0850 | Msp_0385 | conserved hypothetical | 2.4E−45 | MTH_832 | conserved protein | 1.4E−43 |
| | | membrane-spanning protein | | | | |
| MSM0851 | Msp_0386 | predicted transcriptional regulator | 1.1E−70 | MTH_834 | conserved protein | 3.0E−98 |
| MSM0852 | Msp_0387 | predicted ATP-utilizing enzyme | 2.3E−40 | MTH_835 | conserved protein | 1.0E−53 |
| MSM0853 | Msp_0217 | predicted UDP-N- | 1.4E−120 | MTH_837 | UDP-N- | 1.3E−136 |
| | | acetylglucosamine 2-epimerase | | | acetylglucosamine 2- | |
| | | | | | epimerase | |
| MSM0854 | NONE | | | NONE | | |
| MSM0855 | Msp_0388 | TruA | 5.2E−50 | MTH_840 | pseudouridylate synthase I | 1.6E−51 |
| MSM0856 | NONE | | | MTH_695 | conserved protein | 1.7E−08 |
| MSM0857 | Msp_1000 | predicted ABC-type | 1.5E−29 | MTH_696 | ABC transporter | 3.3E−44 |
| | | nitrate/sulfonate/bicarbonate | | | (glutamine transport ATP- | |
| | | transport system, ATB-binding | | | binding protein) | |
| | | protein | | | | |
| MSM0858 | Msp_0389 | HisA | 6.3E−77 | MTH_843 | phosphoribosylformimino- | 7.4E−79 |
| | | | | | 5-aminoimidazole | |
| | | | | | carboxamide ribotide | |
| | | | | | isomerase | |
| MSM0859 | Msp_0390 | putative cytidylyltransferase | 5.1E−43 | MTH_844 | autotrophic growth | 1.5E−48 |
| | | | | | protein | |
| MSM0860 | Msp_0552 | ArgC | 4.9E−109 | MTH_846 | N-acetyl-gamma-glutamyl- | 2.0E−108 |
| | | | | | phosphate reductase | |
| MSM0861 | Msp_0554 | hypothetical protein | 4.8E−31 | MTH_847 | unknown | 3.3E−44 |
| MSM0862 | Msp_0521 | PyrI | 2.1E−44 | MTH_850 | aspartate | 7.5E−47 |
| | | | | | carbamoyltransferase | |
| | | | | | regulatory subunit | |
| MSM0863 | Msp_1419 | hypothetical protein | 3.1E−20 | NONE | | |
| MSM0864 | NONE | | | MTH_1285 | conserved protein | 2.7E−10 |
| MSM0865 | Msp_0159 | conserved hypothetical protein | 1.1E−79 | MTH_853 | conserved protein | 2.4E−96 |
| MSM0866 | Msp_0402 | predicted zinc metalloprotease | 4.7E−143 | MTH_856 | zinc metalloproteinase | 8.2E−144 |
| MSM0867 | Msp_0403 | conserved hypothetical protein | 1.1E−47 | MTH_857 | conserved protein | 4.0E−48 |
| MSM0868 | NONE | | | NONE | | |
| MSM0869 | Msp_0404 | predicted GTPase | 3.0E−93 | NONE | GTP-binding protein, | 8.2E−112 |
| | | | | | GTP1/OBG family | |
| MSM0870 | Msp_0405 | putative small heat shock protein | 1.2E−16 | NONE | heat shock protein, class I | 3.8E−20 |
| MSM0871 | Msp_0017 | conserved hypothetical protein | 1.7E−28 | NONE | | |
| MSM0872 | Msp_1054 | predicted phosphosugar | 1.2E−103 | MTH_860 | glucosamine--fructose-6- | 5.6E−113 |
| | | isomerase | | | phosphate | |
| | | | | | aminotransferase | |
| MSM0873 | Msp_1309 | conserved hypothetical protein | 7.6E−17 | MTH_863 | conserved protein | 5.4E−28 |
| MSM0874 | Msp_1308 | adenine deaminase | 1.5E−139 | MTH_866 | adenine deaminase | 1.3E−132 |
| MSM0875 | Msp_1347 | conserved hypothetical protein | 6.0E−136 | MTH_867 | conserved protein | 6.4E−144 |
| MSM0876 | Msp_0415 | predicted | 1.3E−71 | MTH_868 | agmatine ureohydrolase | 1.2E−73 |
| | | arginase/agmatinase/formimionoglutamate | | | | |
| | | hydrolase | | | | |
| MSM0877 | Msp_1352 | translation initiation factor 5A (aIF- | 4.4E−53 | NONE | translation initiation factor, | 1.7E−49 |
| | | 5A) | | | eIF-5A | |
| MSM0878 | Msp_1327 | PdaD | 2.1E−37 | MTH_870 | conserved protein | 3.4E−42 |
| MSM0879 | Msp_1330 | PpnK | 7.2E−60 | MTH_872 | conserved protein | 9.0E−77 |
| MSM0880 | Msp_1331 | predicted UDP-N-acetylmuramyl | 1.1E−47 | MTH_873 | UDP-N-acetylmuramyl | 5.4E−81 |
| | | pentapeptide synthase | | | tripeptide synthetase | |
| | | | | | related protein | |
| MSM0881 | Msp_1332 | HemC | 7.3E−83 | MTH_874 | porphobilinogen | 2.0E−85 |
| | | | | | deaminase | |
| MSM0882 | Msp_1333 | predicted dehydrogenase | 2.7E−101 | NONE | 3-chlorobenzoate-3,4- | 3.0E−130 |
| | | | | | dioxygenase | |
| | | | | | dyhydrogenase related | |
| | | | | | protein | |
| MSM0883 | Msp_1334 | predicted orotate | 5.6E−53 | MTH_876 | orotate | 9.7E−70 |
| | | phosphoribosyltransferase | | | phosphoribosyltransferase | |
| MSM0884 | Msp_0747 | member of asn/thr-rich large | 1.5E−18 | MTH_716 | cell surface glycoprotein | 4.1E−07 |
| | | protein family | | | (s-layer protein) | |
| MSM0885 | Msp_1465 | member of asn/thr-rich large | 2.4E−39 | MTH_716 | cell surface glycoprotein | 1.7E−08 |
| | | protein family | | | (s-layer protein) | |
| MSM0886 | NONE | | | NONE | | |
| MSM0887 | Msp_1410 | predicted universal stress protein | 2.5E−18 | MTH_898 | conserved protein | 1.5E−18 |
| MSM0888 | Msp_1416 | GdhA | 2.6E−181 | NONE | | |
| MSM0889 | NONE | | | NONE | | |
| MSM0890 | NONE | | | NONE | | |
| MSM0891 | Msp_1363 | peptide chain release factor, | 3.4E−149 | NONE | peptide chain release | 8.7E−156 |
| | | subunit 1 (aRF-1) | | | factor eRF, subunit 1 | |
| MSM0892 | Msp_1056 | hypothetical membrane-spanning | 5.4E−06 | MTH_1905 | unknown | 3.2E−06 |
| | | protein | | | | |
| MSM0893 | Msp_1202 | predicted acetyltransferase | 2.4E−29 | NONE | N-terminal | 3.7E−38 |
| | | | | | acetyltransferase | |
| | | | | | complex, subunit ARD1 | |
| MSM0894 | Msp_1203 | conserved hypothetical protein | 5.7E−28 | MTH_1000 | conserved protein | 1.2E−25 |
| MSM0895 | Msp_1204 | predicted cation transport ATPase | 3.9E−235 | MTH_1001 | cation-transporting P- | 9.8E−251 |
| | | | | | ATPase PacL | |
| MSM0896 | Msp_1205 | CbiJ | 6.5E−43 | MTH_1002 | cobalamin biosynthesis | 8.5E−39 |
| | | | | | protein J | |
| MSM0897 | Msp_1365 | 30S ribosomal protein S10P | 1.6E−48 | MTH_1059 | ribosomal protein S20 | 1.3E−49 |
| | | | | | (E. coli) | |
| MSM0898 | Msp_1366 | translation elongation factor 1- | 1.9E−185 | NONE | translation elongation | 3.9E−192 |
| | | alpha (EF-Tu) | | | factor, EF-1 alpha | |
| MSM0899 | Msp_1367 | FusA | 1.7e−319 | NONE | translation elongation | 1.9e−318 |
| | | | | | factor, EF-2 | |
| MSM0900 | Msp_1368 | 30S ribosomal protein S7P | 3.3E−80 | MTH_1056 | ribosomal protein S5 | 9.2E−81 |
| | | | | | (E. coli) | |
| MSM0901 | Msp_1369 | 30S ribosomal protein S12P | 4.4E−69 | MTH_1055 | ribosomal protein S23 | 7.8E−68 |
| | | | | | (E. coli) | |
| MSM0902 | Msp_0321 | MrtA | 5.7E−250 | NONE | methyl coenzyme M | 2.0E−250 |
| | | | | | reductase II, alpha | |
| | | | | | subunit | |
| MSM0903 | Msp_0320 | MrtG | 1.6E−103 | NONE | methyl coenzyme M | 1.8E−116 |
| | | | | | reductase II, gamma | |
| | | | | | subunit | |
| MSM0904 | Msp_0319 | MrtD | 1.9E−45 | NONE | methyl coenzyme M | 2.2E−40 |
| | | | | | reductase II, D protein | |
| MSM0905 | Msp_0318 | MrtB | 9.8E−159 | NONE | methyl coenzyme M | 4.1E−181 |
| | | | | | reductase II, beta subunit | |
| MSM0906 | Msp_1370 | NusA | 1.7E−44 | MTH_1054 | transcription termination | 2.5E−55 |
| | | | | | factor NusA | |
| MSM0907 | Msp_1371 | 50S ribosomal protein L30e | 6.0E−33 | MTH_1053 | ribosomal protein L30 | 3.0E−36 |
| MSM0908 | Msp_1372 | RpoA2 | 2.1E−126 | NONE | DNA-dependent RNA | 4.7E−141 |
| | | | | | polymerase, subunit A″ | |
| MSM0909 | Msp_1373 | RpoA1 | 0.0E+00 | NONE | DNA-dependent RNA | 0.0E+00 |
| | | | | | polymerase, subunit A′ | |
| MSM0910 | Msp_1374 | RpoB1 | 6.1E−253 | NONE | DNA-dependent RNA | 4.6E−276 |
| | | | | | polymerase, subunit B′ | |
| MSM0911 | Msp_1375 | RpoB2 | 3.3E−103 | NONE | DNA-dependent RNA | 8.6E−220 |
| | | | | | polymerase, subunit B″ | |
| MSM0912 | Msp_1376 | RpoH | 7.6E−17 | NONE | DNA-dependent RNA | 4.6E−15 |
| | | | | | polymerase, subunit H | |
| MSM0913 | NONE | | | NONE | | |
| MSM0914 | NONE | | | MTH_72 | O-linked GlcNAc | 3.0E−04 |
| | | | | | transferase | |
| MSM0915 | NONE | | | NONE | | |
| MSM0916 | Msp_0682 | ThiM1 | 1.2E−73 | NONE | | |
| MSM0917 | Msp_0683 | hypothetical protein | 7.7E−56 | NONE | | |
| MSM0918 | Msp_1381 | phosphoglycerate kinase | 1.1E−120 | MTH_1042 | 3-phosphoglycerate | 4.3E−131 |
| | | | | | kinase | |
| MSM0919 | Msp_1382 | TpiA | 4.9E−77 | MTH_1041 | triosephosphate | 3.2E−71 |
| | | | | | isomerase | |
| MSM0920 | Msp_1103 | member of asn/thr-rich large | 4.2E−04 | NONE | | |
| | | protein family | | | | |
| MSM0921 | Msp_0548 | hypothetical membrane-spanning | 1.1E−05 | NONE | | |
| | | protein | | | | |
| MSM0922 | Msp_1383 | predicted Fe—S oxidoreductase | 1.7E−97 | MTH_1039 | conserved protein | 4.9E−98 |
| MSM0923 | Msp_0540 | predicted multimeric flavodoxin | 1.2E−16 | MTH_135 | conserved protein | 1.3E−17 |
| MSM0924 | Msp_1386 | SucC | 3.4E−101 | NONE | succinyl-CoA synthetase, | 3.7E−116 |
| | | | | | beta subunit | |
| MSM0925 | Msp_1387 | KorC | 9.5E−58 | NONE | 2-oxoglutarate | 8.8E−60 |
| | | | | | oxidoreductase, gamma | |
| | | | | | subunit | |
| MSM0926 | Msp_1388 | KorB | 1.3E−99 | NONE | 2-oxoglutarate | 2.2E−102 |
| | | | | | oxidoreductase, beta | |
| | | | | | subunit | |
| MSM0927 | Msp_1389 | KorA | 4.5E−138 | NONE | 2-oxoglutarate | 6.2E−130 |
| | | | | | oxidoreductase, alpha | |
| | | | | | subunit | |
| MSM0928 | Msp_1390 | KorD | 3.0E−15 | NONE | ferredoxin (putative 2- | 8.6E−14 |
| | | | | | oxoglutarate | |
| | | | | | oxidoreductase, delat | |
| | | | | | subunit) | |
| MSM0929 | Msp_0791 | fumarate hydratase | 3.7E−17 | NONE | fumarate hydratase, class I | 3.5E−40 |
| MSM0930 | Msp_0325 | predicted peptidyl-prolyl cis-trans | 3.5E−67 | MTH_1125 | fkbp-type peptidyl-prolyl | 1.8E−77 |
| | | isomerase 2 | | | cis-trans isomerase | |
| MSM0931 | Msp_0801 | conserved hypothetical protein | 7.0E−94 | MTH_448 | unknown | 4.8E−68 |
| MSM0932 | Msp_1167 | conserved hypothetical protein | 4.7E−49 | MTH_1113 | conserved protein | 1.6E−58 |
| MSM0933 | Msp_1168 | CobS | 1.2E−50 | MTH_1112 | cobalamin (5′-phosphate) | 1.9E−41 |
| | | | | | synthase | |
| MSM0934 | Msp_1169 | hypothetical protein | 1.1E−06 | MTH_1111 | conserved protein | 1.5E−41 |
| MSM0935 | Msp_1170 | conserved hypothetical protein | 4.5E−106 | MTH_1109 | conserved protein | 4.2E−92 |
| MSM0936 | Msp_1171 | predicted ATPase | 6.3E−77 | MTH_1108 | conserved protein | 1.0E−65 |
| MSM0937 | NONE | | | NONE | | |
| MSM0938 | NONE | | | NONE | | |
| MSM0939 | Msp_1173 | PycB | 1.4E−212 | NONE | oxaloacetate | 2.8E−221 |
| | | | | | decarboxylase, alpha | |
| | | | | | subunit | |
| MSM0940 | Msp_1166 | predicted myo-inositol-1- | 5.3E−151 | MTH_1105 | conserved protein | 9.4E−159 |
| | | phosphate synthase | | | | |
| MSM0941 | Msp_0634 | predicted prenyltransferase | 2.3E−70 | MTH_1098 | bacteriochlorophyll | 4.2E−69 |
| | | | | | synthase related protein | |
| MSM0942 | Msp_0616 | partially conserved hypothetical | 5.0E−52 | MTH_371 | unknown | 5.1E−35 |
| | | membrane-spanning protein | | | | |
| MSM0943 | NONE | | | MTH_466 | unknown | 5.6E−09 |
| MSM0944 | NONE | | | NONE | | |
| MSM0945 | Msp_1285 | hydrogenase | 9.3E−147 | MTH_1072 | hydrogenase | 2.2E−141 |
| | | expression/formation protein | | | expression/formation | |
| | | | | | protein HypD | |
| MSM0946 | Msp_0215 | predicted glycosyltransferase | 6.1E−04 | MTH_1071 | conserved protein | 3.9E−50 |
| MSM0947 | Msp_1284 | predicted modulator of DNA | 3.7E−95 | MTH_1070 | conserved protein | 1.5E−96 |
| | | gyrase | | | | |
| MSM0948 | Msp_0220 | predicted glycosyltransferase | 4.0E−04 | NONE | | |
| MSM0949 | Msp_1351 | predicted transcriptional activator | 6.7E−18 | MTH_628 | unknown | 1.6E−19 |
| MSM0950 | NONE | | | MTH_1003 | molybdenum cofactor | 6.8E−101 |
| | | | | | biosynthesis protein MoeA | |
| MSM0951 | Msp_1335 | translation initiation factor 1A (aIF- | 1.6E−41 | NONE | translation initiation factor, | 1.3E−44 |
| | | 1A) (eIF1A) | | | eIF-1A | |
| MSM0952 | Msp_1337 | predicted serine/threonine protein | 5.1E−59 | MTH_1005 | conserved protein | 1.1E−75 |
| | | kinase | | | | |
| MSM0953 | NONE | | | MTH_630 | unknown | 1.5E−04 |
| MSM0954 | Msp_1338 | predicted RNA-binding protein | 1.4E−56 | MTH_1006 | conserved protein | 2.0E−60 |
| MSM0955 | Msp_1339 | type II DNA topoisomerase VI, | 2.4E−203 | MTH_1007 | conserved protein | 1.5E−213 |
| | | subunit B | | | | |
| MSM0956 | Msp_1340 | type II DNA topoisomerase VI, | 4.3E−149 | MTH_1008 | conserved protein | 1.8E−155 |
| | | subunit A | | | | |
| MSM0957 | Msp_0119 | hypothetical membrane-spanning | 6.8E−20 | MTH_524 | unknown | 4.9E−35 |
| | | protein | | | | |
| MSM0958 | Msp_1110 | CobN | 5.3E−11 | MTH_515 | unknown | 1.1E−08 |
| MSM0959 | Msp_0994 | conserved hypothetical protein | 3.0E−31 | NONE | | |
| MSM0960 | Msp_0678 | predicted cation transport ATPase | 4.8E−134 | MTH_411 | cadmium efflux ATPase | 1.9E−80 |
| MSM0961 | Msp_0224 | predicted cation transport ATPase | 9.6E−07 | MTH_1535 | heavy-metal transporting | 1.4E−08 |
| | | | | | CPx-type ATPase | |
| MSM0962 | Msp_1346 | glyceraldehyde 3-phosphate | 4.7E−127 | MTH_1009 | glyceraldehyde 3- | 5.9E−134 |
| | | dehydrogenase | | | phosphate | |
| | | | | | dehydrogenase | |
| MSM0963 | Msp_0992 | putative endonuclease IV | 9.5E−06 | MTH_1010 | endonuclease IV | 6.6E−71 |
| MSM0964 | Msp_1349 | predicted phosphohydrolase | 8.0E−19 | MTH_1179 | conserved protein | 1.1E−38 |
| MSM0965 | Msp_0718 | preducted 3-hydroxyacyl-CoA | 2.6E−126 | NONE | | |
| | | dehydrogenase | | | | |
| MSM0966 | Msp_1415 | putative 26S protease, regulatory | 6.5E−107 | MTH_1011 | ATP-dependent 26S | 7.4E−111 |
| | | subunit | | | protease regulatory | |
| | | | | | subunit 8 | |
| MSM0967 | Msp_1408 | HemA | 4.6E−90 | MTH_1012 | glutamyl-tRNA reductase | 3.2E−94 |
| MSM0968 | Msp_1407 | predicted siroheme synthase | 2.4E−45 | MTH_1013 | conserved protein | 1.9E−41 |
| MSM0969 | Msp_1406 | predicted metal-binding | 4.9E−54 | MTH_1014 | conserved protein | 5.6E−58 |
| | | transcription factor | | | | |
| MSM0970 | Msp_0784 | hypothetical protein | 1.3E−21 | NONE | | |
| MSM0971 | Msp_0393 | methyl-coenzyme M reductase, | 7.6E−191 | NONE | methyl coenzyme M | 4.3E−209 |
| | | component A2 | | | reductase system, | |
| | | | | | component A2 | |
| MSM0972 | Msp_1405 | conserved hypothetical protein | 1.3E−46 | MTH_1016 | conserved protein | 5.5E−51 |
| MSM0973 | Msp_1404 | putative GTP cyclohydrolase III | 9.2E−76 | MTH_1017 | conserved protein | 1.3E−88 |
| MSM0974 | Msp_1403 | CofD | 3.6E−90 | MTH_1018 | conserved protein | 8.0E−98 |
| MSM0975 | Msp_1402 | CofE | 3.8E−63 | MTH_1019 | conserved protein | 1.6E−76 |
| MSM0976 | Msp_1398 | PurO | 2.8E−51 | MTH_1020 | conserved protein | 1.0E−51 |
| MSM0977 | Msp_1397 | conserved hypothetical | 3.7E−24 | MTH_1021 | unknown | 3.2E−30 |
| | | membrane-spanning protein | | | | |
| MSM0978 | Msp_1396 | predicted biopolymer transport | 1.5E−77 | MTH_1022 | biopolymer transport | 4.1E−94 |
| | | protein | | | protein | |
| MSM0979 | Msp_1395 | RnhB | 1.6E−48 | MTH_1023 | ribonuclease HII | 9.8E−61 |
| MSM0980 | Msp_1517 | DnaK | 5.3E−16 | MTH_1024 | rod shape-determining | 7.3E−136 |
| | | | | | protein | |
| MSM0981 | NONE | | | MTH_1025 | unknown | 2.6E−51 |
| MSM0982 | Msp_1394 | partially conserved hypothetical | 2.4E−38 | MTH_1027 | CDP-diacylglycerol-serine | 8.2E−41 |
| | | membrane-spanning protein | | | O-phosphatidyltransferase | |
| MSM0983 | Msp_1393 | conserved hypothetical | 8.7E−48 | MTH_1028 | unknown | 1.7E−70 |
| | | membrane-spanning protein | | | | |
| MSM0984 | NONE | | | MTH_1030 | unknown | 1.4E−45 |
| MSM0985 | Msp_1392 | conserved hypothetical protein | 1.1E−29 | MTH_1031 | conserved protein | 6.3E−34 |
| MSM0986 | Msp_0760 | putative bile salt acid hydrolase | 4.3E−110 | NONE | | |
| MSM0987 | Msp_0329 | MfnA | 3.9E−100 | MTH_1116 | glutamate decarboxylase | 6.1E−123 |
| MSM0988 | Msp_0328 | PpsA | 1.7E−273 | MTH_1118 | phosphoenolpyruvate | 2.0E−250 |
| | | | | | synthase | |
| MSM0989 | Msp_0327 | 50S ribosomal protein L10e | 2.8E−58 | MTH_1119 | ribosomal protein L10 | 2.1E−65 |
| MSM0990 | Msp_1000 | predicted ABC-type | 4.7E−40 | MTH_920 | anion permease | 4.2E−37 |
| | | nitrate/sulfonate/bicarbonate | | | | |
| | | transport system, ATB-binding | | | | |
| | | protein | | | | |
| MSM0991 | Msp_1001 | predicted ABC-type | 2.4E−11 | MTH_478 | sulfate transport system | 4.1E−09 |
| | | nitrate/sulfonate/bicarbonate | | | permease protein | |
| | | transport system, permease | | | | |
| | | protein | | | | |
| MSM0992 | Msp_0326 | hypothetical protein | 1.0E−12 | MTH_1121 | unknown | 8.9E−12 |
| MSM0993 | Msp_0601 | partially conserved hypothetical | 3.9E−04 | MTH_1123 | unknown | 1.9E−15 |
| | | protein, predicted GTPase | | | | |
| MSM0994 | Msp_0324 | predicted nucleotidyltransferase | 3.4E−101 | MTH_1126 | conserved protein | 2.7E−90 |
| MSM0995 | Msp_0590 | member of asn/thr-rich large | 8.7E−33 | MTH_716 | cell surface glycoprotein | 1.3E−09 |
| | | protein family | | | (s-layer protein) | |
| MSM0996 | Msp_0983 | member of asn/thr-rich large | 2.6E−26 | MTH_716 | cell surface glycoprotein | 1.1E−09 |
| | | protein family | | | (s-layer protein) | |
| MSM0997 | Msp_0323 | PyrC | 1.1E−97 | MTH_1127 | dihydroorotase | 7.8E−100 |
| MSM0998 | Msp_1447 | EhbK | 1.0E−30 | MTH_1133 | polyferredoxin (MvhB) | 4.4E−145 |
| MSM0999 | Msp_0316 | MvhA | 3.4E−181 | NONE | methyl viologen-reducing | 2.1E−207 |
| | | | | | hydrogenase, alpha | |
| | | | | | subunit | |
| MSM1000 | Msp_0315 | MvhG | 3.2E−128 | NONE | methyl viologen-reducing | 5.5E−138 |
| | | | | | hydrogenase, gamma | |
| | | | | | subunit | |
| MSM1001 | Msp_0314 | MvhD1 | 3.9E−61 | NONE | methyl viologen-reducing | 1.6E−67 |
| | | | | | hydrogenase, delta | |
| | | | | | subunit | |
| MSM1002 | Msp_0312 | conserved hypothetical protein | 1.2E−130 | MTH_1150 | ABC transporter subunit | 3.5E−152 |
| | | | | | Ycf24 | |
| MSM1003 | Msp_0313 | predicted ABC-type transport | 3.2E−82 | MTH_1149 | ABC transporter subunit | 8.0E−98 |
| | | system | | | Ycf16 | |
| MSM1004 | Msp_0311 | conserved hypothetical protein | 1.2E−27 | MTH_1151 | unknown | 9.3E−33 |
| MSM1005 | Msp_0310 | predicted | 4.0E−36 | MTH_1152 | conserved protein | 7.0E−35 |
| | | GTP:adenosylcobinamide- | | | | |
| | | phosphate guanylyltransferase | | | | |
| MSM1006 | Msp_0308 | conserved hypothetical protein | 2.2E−90 | MTH_1153 | conserved protein | 5.2E−165 |
| MSM1007 | Msp_0307 | MtrH | 2.1E−108 | MTH_1156 | N5-methyl- | 2.9E−125 |
| | | | | | tetrahydromethanopterin:coenzyme M | |
| | | | | | methyltransferase, subunit H | |
| MSM1008 | Msp_0306 | MtrG | 5.7E−12 | MTH_1157 | N5-methyl- | 4.2E−21 |
| | | | | | tetrahydromethanopterin:coenzyme M | |
| | | | | | methyltransferase, subunit G | |
| MSM1009 | Msp_0305 | MtrF | 5.5E−07 | MTH_1158 | N5-methyl- | 9.3E−17 |
| | | | | | tetrahydromethanopterin:coenzyme M | |
| | | | | | methyltransferase, subunit F | |
| MSM1010 | Msp_0304 | MtrA | 9.0E−62 | MTH_1159 | N5-methyl- | 9.8E−93 |
| | | | | | tetrahydromethanopterin:coenzyme M | |
| | | | | | methyltransferase, subunit A | |
| MSM1011 | Msp_0303 | MtrB | 1.0E−12 | MTH_1160 | N5-methyl- | 1.7E−31 |
| | | | | | tetrahydromethanopterin:coenzyme M | |
| | | | | | methyltransferase, subunit B | |
| MSM1012 | Msp_0302 | MtrC | 7.6E−49 | MTH_1161 | N5-methyl- | 7.2E−81 |
| | | | | | tetrahydromethanopterin:coenzyme M | |
| | | | | | methyltransferase, subunit C | |
| MSM1013 | Msp_0301 | MtrD | 2.0E−57 | MTH_1162 | N5-methyl- | 1.0E−81 |
| | | | | | tetrahydromethanopterin:coenzyme M | |
| | | | | | methyltransferase, subunit D | |
| MSM1014 | Msp_0300 | MtrE | 9.5E−74 | MTH_1163 | N5-methyl- | 1.5E−121 |
| | | | | | tetrahydromethanopterin:coenzyme M | |
| | | | | | methyltransferase, subunit E | |
| MSM1015 | Msp_0321 | MrtA | 7.6E−207 | NONE | methyl coenzyme M | 1.7E−253 |
| | | | | | reductase I, alpha subunit | |
| MSM1016 | Msp_0320 | MrtG | 6.2E−86 | NONE | methyl coenzyme M | 2.9E−109 |
| | | | | | reductase I, gamma | |
| | | | | | subunit | |
| MSM1017 | Msp_0299 | McrC | 2.8E−67 | NONE | methyl coenzyme M | 2.6E−83 |
| | | | | | reductase I, C protein | |
| MSM1018 | Msp_0319 | MrtD | 7.4E−19 | NONE | methyl coenzyme M | 1.1E−34 |
| | | | | | reductase I, D protein | |
| MSM1019 | Msp_0318 | MrtB | 1.6E−133 | NONE | methyl coenzyme M | 3.4E−177 |
| | | | | | reductase I, beta subunit | |
| MSM1020 | Msp_0298 | predicted Fe—S oxidoreductase | 2.0E−119 | MTH_1170 | conserved protein | 1.7E−136 |
| MSM1021 | Msp_0284 | conserved hypothetical protein | 1.7E−99 | MTH_1180 | conserved protein | 6.7E−117 |
| MSM1022 | Msp_0285 | conserved hypothetical protein | 8.5E−34 | MTH_1181 | unknown | 2.0E−23 |
| MSM1023 | Msp_0973 | ComB2 | 1.3E−44 | MTH_1182 | conserved protein | 2.7E−42 |
| MSM1024 | Msp_0287 | conserved hypothetical | 1.9E−98 | MTH_1183 | pheromone shutdown | 4.4E−58 |
| | | membrane-spanning protein | | | protein TraB | |
| MSM1025 | Msp_0288 | hypothetical protein | 1.5E−20 | MTH_1184 | unknown | 3.0E−20 |
| MSM1026 | NONE | | | MTH_1224 | inosine-5′- | 5.6E−04 |
| | | | | | monophosphate | |
| | | | | | dehydrogenase related | |
| | | | | | protein III | |
| MSM1027 | NONE | | | MTH_1155 | Na+/Ca+ exchanging | 2.1E−42 |
| | | | | | protein related | |
| MSM1028 | Msp_0289 | predicted ATPase | 9.5E−74 | MTH_1186 | conserved protein | 2.0E−85 |
| MSM1029 | Msp_0693 | conserved hypothetical protein | 1.3E−39 | MTH_1187 | conserved protein | 3.2E−23 |
| MSM1030 | Msp_0290 | predicted pyridoxal phosphate- | 1.3E−124 | MTH_1188 | pleiotropic regulatory | 6.1E−123 |
| | | dependent enzyme | | | protein DegT | |
| MSM1031 | Msp_0291 | N2,N2-dimethylguanosine tRNA | 1.1E−109 | NONE | N2,N2-dimethylguanosine | 4.1E−110 |
| | | methyltransferase | | | tRNA methyltransferase | |
| MSM1032 | Msp_0293 | predicted transcriptional regulator | 9.3E−44 | MTH_1193 | transcriptional regulator | 2.9E−52 |
| MSM1033 | Msp_0294 | conserved hypothetical protein | 1.8E−109 | MTH_1196 | conserved protein | 7.7E−116 |
| MSM1034 | Msp_0295 | conserved hypothetical protein | 6.0E−17 | MTH_1197 | conserved protein | 1.1E−22 |
| MSM1035 | Msp_0296 | CofG | 4.2E−96 | MTH_1198 | biotin synthetase related | 6.4E−105 |
| | | | | | protein | |
| MSM1036 | Msp_0297 | predicted methyltransferase | 2.3E−70 | MTH_1200 | met-10+ related protein | 5.7E−72 |
| MSM1037 | Msp_0282 | PsmB | 7.5E−58 | NONE | proteasome, beta subunit | 7.8E−68 |
| MSM1038 | Msp_0281 | predicted exonuclease | 5.4E−245 | MTH_1203 | cleavage and | 3.5E−278 |
| | | | | | polyadenylation specificity | |
| | | | | | factor | |
| MSM1039 | Msp_0280 | PurM | 1.6E−103 | MTH_1204 | phosphoribosylformylglycinamidine | 4.0E−112 |
| | | | | | cyclo-ligase | |
| MSM1040 | Msp_0279 | ComC | 7.6E−104 | MTH_1205 | malate dehydrogenase | 5.7E−104 |
| MSM1041 | Msp_1507 | putative DNA polymerase | 6.8E−167 | MTH_1208 | DNA-dependent DNA | 5.1E−183 |
| | | | | | polymerase family B | |
| | | | | | (PolB1) | |
| MSM1042 | NONE | | | MTH_1211 | conserved protein | 4.0E−71 |
| MSM1043 | Msp_1420 | PyrK | 4.4E−69 | NONE | cytochrome-c3 | 1.6E−74 |
| | | | | | hydrogenase, gamma | |
| | | | | | subunit | |
| MSM1044 | Msp_1421 | PyrD | 7.4E−90 | MTH_1213 | dihydroorotate oxidase | 1.3E−106 |
| MSM1045 | Msp_0220 | predicted glycosyltransferase | 1.9E−12 | MTH_1626 | phosphoserine | 2.4E−05 |
| | | | | | phosphatase | |
| MSM1046 | Msp_1422 | predicted ribosomal biogenesis | 1.2E−89 | MTH_1214 | pre-mRNA splicing protein | 1.4E−88 |
| | | protein | | | PRP31 | |
| MSM1047 | Msp_1423 | FlpA | 5.3E−64 | MTH_1215 | fibrillarin-like pre-rRNA | 2.5E−62 |
| | | | | | processing protein | |
| MSM1048 | Msp_1424 | predicted | 1.9E−43 | MTH_1216 | pantothenate metabolism | 2.3E−52 |
| | | phosphopantothenoylcysteine | | | flavoprotein | |
| | | synthetase/decarboxylase | | | | |
| MSM1049 | Msp_1424 | predicted | 2.0E−55 | MTH_1216 | pantothenate metabolism | 2.2E−54 |
| | | phosphopantothenoylcysteine | | | flavoprotein | |
| | | synthetase/decarboxylase | | | | |
| MSM1050 | Msp_1425 | conserved hypothetical | 4.7E−11 | MTH_1218 | unknown | 3.3E−21 |
| | | membrane-spanning protein | | | | |
| MSM1051 | Msp_1426 | hypothetical membrane-spanning | 3.5E−05 | MTH_1219 | unknown | 9.0E−19 |
| | | protein | | | | |
| MSM1052 | Msp_1427 | PheA | 2.5E−59 | MTH_1220 | chorismate mutase | 1.1E−70 |
| MSM1053 | Msp_1428 | conserved hypothetical protein | 4.4E−60 | MTH_1222 | inosine-5′- | 4.5E−72 |
| | | | | | monophosphate | |
| | | | | | dehydrogenase related | |
| | | | | | protein I | |
| MSM1054 | Msp_1429 | conserved hypothetical protein | 2.2E−74 | MTH_1224 | inosine-5′- | 1.3E−83 |
| | | | | | monophosphate | |
| | | | | | dehydrogenase related | |
| | | | | | protein III | |
| MSM1055 | Msp_1431 | partially conserved hypothetical | 1.9E−36 | MTH_1227 | coenzyme PQQ synthesis | 1.9E−57 |
| | | protein | | | protein III | |
| MSM1056 | Msp_1432 | putative 6-pyruvoyl | 1.4E−38 | MTH_1228 | conserved protein | 4.6E−47 |
| | | tetrahydrobiopterin synthase | | | | |
| MSM1057 | Msp_1433 | conserved hypothetical protein | 2.1E−53 | MTH_1229 | conserved protein | 2.1E−49 |
| MSM1058 | Msp_1434 | conserved hypothetical protein | 5.6E−85 | MTH_1231 | conserved protein | 1.1E−95 |
| MSM1059 | Msp_0945 | predicted RecB family | 1.2E−06 | MTH_1233 | unknown | 1.4E−36 |
| | | exonuclease | | | | |
| MSM1060 | Msp_1436 | EhbQ | 4.9E−61 | MTH_1235 | conserved protein | 1.2E−69 |
| MSM1061 | Msp_1442 | EhbP | 6.3E−22 | MTH_1236 | conserved protein | 1.6E−28 |
| MSM1062 | Msp_1443 | EhbO | 6.1E−79 | NONE | NADH dehydrogenase | 5.8E−111 |
| | | | | | (ubiquinone), subunit 1 | |
| | | | | | related protein | |
| MSM1063 | Msp_1444 | EhbN | 8.0E−141 | NONE | formate hydrogenlyase, | 2.8E−143 |
| | | | | | subunit 5 | |
| MSM1064 | Msp_1445 | EhbM | 1.0E−62 | NONE | formate hydrogenlyase, | 1.6E−67 |
| | | | | | subunit 7 | |
| MSM1065 | Msp_1446 | EhbL | 8.6E−41 | MTH_1240 | ferredoxin-like protein | 3.4E−51 |
| MSM1066 | Msp_1447 | EhbK | 7.7E−72 | MTH_1241 | polyferredoxin | 1.7E−97 |
| MSM1067 | Msp_1448 | EhbJ | 4.5E−12 | MTH_1242 | unknown | 5.5E−19 |
| MSM1068 | Msp_1449 | EhbI | 4.2E−48 | MTH_1243 | conserved protein | 1.0E−49 |
| MSM1069 | Msp_1450 | EhbH | 3.5E−21 | MTH_1244 | conserved protein | 5.0E−25 |
| MSM1070 | Msp_1451 | EhbG | 4.8E−15 | MTH_1245 | unknown | 6.6E−16 |
| MSM1071 | Msp_1452 | EhbF | 1.1E−134 | NONE | NADH dehydrogenase I, | 8.4E−142 |
| | | | | | subunit N | |
| MSM1072 | Msp_1453 | EhbE | 2.0E−32 | MTH_1247 | conserved protein | 4.5E−40 |
| MSM1073 | Msp_1454 | EhbD | 4.1E−18 | MTH_1248 | conserved protein | 9.4E−24 |
| MSM1074 | Msp_1455 | EhbC | 1.4E−10 | MTH_1249 | conserved protein | 1.5E−18 |
| MSM1075 | Msp_1456 | EhbB | 2.2E−10 | MTH_1250 | unknown | 1.1E−13 |
| MSM1076 | Msp_1457 | EhbA | 1.2E−27 | MTH_1251 | conserved protein | 6.8E−37 |
| MSM1077 | Msp_1336 | predicted permease | 2.3E−05 | NONE | | |
| MSM1078 | Msp_1336 | predicted permease | 9.6E−97 | MTH_900 | conserved protein | 3.1E−32 |
| MSM1079 | Msp_1458 | conserved hypothetical | 2.1E−28 | MTH_1252 | conserved protein | 1.6E−35 |
| | | membrane-spanning protein | | | | |
| MSM1080 | NONE | | | MTH_1253 | unknown | 2.5E−48 |
| MSM1081 | Msp_0795 | partially conserved hypothetical | 1.4E−56 | MTH_1634 | transcriptional control | 5.0E−176 |
| | | protein | | | factor (enhancer-binding | |
| | | | | | protein) | |
| MSM1082 | NONE | | | NONE | | |
| MSM1083 | Msp_0202 | conserved hypothetical | 4.5E−35 | MTH_230 | unknown | 1.0E−33 |
| | | membrane-spanning protein | | | | |
| MSM1084 | Msp_1459 | ArgG | 7.4E−138 | MTH_1254 | argininosuccinate | 2.1E−136 |
| | | | | | synthase | |
| MSM1085 | Msp_1240 | AqpM2 | 1.8E−54 | MTH_103 | water channel protein | 1.5E−71 |
| MSM1086 | NONE | | | MTH_101 | unknown | 3.8E−194 |
| MSM1087 | NONE | | | NONE | | |
| MSM1088 | NONE | | | NONE | | |
| MSM1089 | Msp_0506 | hypothetical membrane-spanning | 3.3E−04 | NONE | | |
| | | protein | | | | |
| MSM1090 | Msp_1057 | SfsA | 6.0E−33 | MTH_1521 | sugar fermentation | 3.6E−31 |
| | | | | | stimulation protein | |
| MSM1091 | Msp_1501 | predicted sugar kinase | 3.6E−97 | MTH_1256 | conserved protein | 1.4E−114 |
| MSM1092 | Msp_1502 | formylmethanofuran- | 1.2E−91 | MTH_1259 | formylmethanofuran:tetrahydro- | 1.3E−127 |
| | | tetrahydromethanopterin | | | methanopterin formyltransferase | |
| | | formyltransferase | | | | |
| MSM1093 | Msp_0233 | conserved hypothetical protein | 2.3E−22 | NONE | | |
| MSM1094 | Msp_1503 | conserved hypothetical | 2.8E−81 | MTH_1261 | conserved protein | 7.2E−97 |
| | | membrane-spanning protein | | | | |
| MSM1095 | Msp_0830 | Trk-type potassium transport | 2.6E−62 | MTH_1264 | TRK system potassium | 2.1E−122 |
| | | system, membrane protein | | | uptake protein TrkH | |
| MSM1096 | Msp_0250 | TrkA1 | 3.1E−52 | MTH_1265 | TRK system potassium | 3.6E−79 |
| | | | | | uptake protein TrkA | |
| MSM1097 | Msp_1505 | putative Zn-dependent hydrolase | 2.3E−40 | MTH_1267 | conserved protein | 1.2E−53 |
| MSM1098 | Msp_1418 | putative archaeal holliday junction | 1.4E−38 | MTH_1270 | conserved protein | 1.4E−43 |
| | | resolvase | | | | |
| MSM1099 | Msp_0270 | predicted biotin synthase related | 7.4E−106 | MTH_1279 | conserved protein | 2.3E−75 |
| | | protein | | | | |
| MSM1100 | NONE | | | MTH_627 | unknown | 7.2E−10 |
| MSM1101 | Msp_0269 | GatB | 1.4E−175 | MTH_1280 | PET112-like protein | 3.6E−182 |
| MSM1102 | Msp_0268 | conserved hypothetical protein | 3.4E−78 | MTH_1282 | inosine-5′- | 2.3E−93 |
| | | | | | monophosphate | |
| | | | | | dehydrogenase related | |
| | | | | | protein VI | |
| MSM1103 | Msp_0267 | HisE | 4.8E−31 | MTH_1283 | phosphoribosyl-AMP | 3.0E−34 |
| | | | | | cyclohydrolase homolog | |
| MSM1104 | Msp_1506 | predicted acetyltransferase | 2.6E−11 | MTH_1284 | conserved protein | 3.2E−16 |
| MSM1105 | Msp_1492 | conserved hypothetical protein | 7.0E−62 | MTH_1286 | phosphoribosylaminoimidazole | 1.7E−65 |
| | | | | | carboxylase related | |
| | | | | | protein | |
| MSM1106 | Msp_1497 | HypF | 8.5E−208 | MTH_1287 | transcriptional regulator | 2.3E−219 |
| | | | | | HypF homolog | |
| MSM1107 | Msp_1519 | predicted transcriptional regulator | 6.6E−34 | MTH_1288 | unknown | 1.8E−52 |
| MSM1108 | Msp_1518 | GrpE | 2.1E−44 | MTH_1289 | heat shock protein GrpE | 1.6E−44 |
| MSM1109 | Msp_1517 | DnaK | 8.6E−247 | MTH_1290 | DnaK protein (Hsp70) | 7.7E−251 |
| MSM1110 | Msp_1516 | DnaJ | 3.0E−118 | MTH_1291 | DnaJ protein | 1.0E−122 |
| MSM1111 | Msp_0145 | member of asn/thr-rich large | 5.9E−49 | MTH_716 | cell surface glycoprotein | 7.7E−12 |
| | | protein family | | | (s-layer protein) | |
| MSM1112 | Msp_0762 | member of asn/thr-rich large | 1.6E−40 | MTH_716 | cell surface glycoprotein | 3.3E−11 |
| | | protein family | | | (s-layer protein) | |
| MSM1113 | Msp_0762 | member of asn/thr-rich large | 2.9E−70 | MTH_716 | cell surface glycoprotein | 1.2E−05 |
| | | protein family | | | (s-layer protein) | |
| MSM1114 | Msp_0145 | member of asn/thr-rich large | 1.3E−24 | MTH_716 | cell surface glycoprotein | 3.3E−15 |
| | | protein family | | | (s-layer protein) | |
| MSM1115 | Msp_0017 | conserved hypothetical protein | 2.2E−21 | NONE | | |
| MSM1116 | Msp_1108 | member of asn/thr-rich large | 4.2E−137 | MTH_911 | probable surface protein | 1.5E−12 |
| | | protein family | | | | |
| MSM1117 | Msp_1110 | CobN | 8.5E−304 | MTH_514 | cobalamin biosynthesis | 1.4E−239 |
| | | | | | protein N | |
| MSM1118 | Msp_1494 | hypothetical membrane-spanning | 1.5E−18 | MTH_1294 | unknown | 2.5E−23 |
| | | protein | | | | |
| MSM1119 | Msp_1495 | hypothetical membrane-spanning | 4.1E−25 | MTH_1295 | unknown | 4.8E−36 |
| | | protein | | | | |
| MSM1120 | Msp_1496 | methionine aminopeptidase | 3.4E−53 | MTH_1296 | methionine | 2.8E−86 |
| | | | | | aminopeptidase | |
| MSM1121 | Msp_1305 | FrhB | 3.9E−77 | NONE | coenzyme F420-reducing | 2.1E−97 |
| | | | | | hydrogenase, beta | |
| | | | | | subunit | |
| MSM1122 | Msp_1304 | FrhG | 4.6E−81 | NONE | coenzyme F420-reducing | 2.2E−102 |
| | | | | | hydrogenase, gamma | |
| | | | | | subunit | |
| MSM1123 | Msp_1514 | putative coenzyme F420 | 9.3E−44 | NONE | coenzyme F420-reducing | 4.7E−61 |
| | | hydrogenase, delta subunit-like | | | hydrogenase, delta | |
| | | protein | | | subunit | |
| MSM1124 | Msp_1302 | FrhA | 9.4E−138 | NONE | coenzyme F420-reducing | 8.8E−163 |
| | | | | | hydrogenase, alpha | |
| | | | | | subunit | |
| MSM1125 | Msp_1110 | CobN | 2.3E−10 | MTH_1301 | unknown | 3.8E−11 |
| MSM1126 | Msp_0120 | predicted transcriptional regulator | 3.1E−20 | MTH_1795 | transcriptional regulator | 1.1E−20 |
| MSM1127 | Msp_0121 | predicted cation transport ATPase | 1.2E−162 | MTH_411 | cadmium efflux ATPase | 1.2E−119 |
| MSM1128 | NONE | | | NONE | | |
| MSM1129 | Msp_1523 | conserved hypothetical protein | 2.3E−118 | MTH_1305 | conserved protein | 3.6E−134 |
| MSM1130 | Msp_1028 | conserved hypothetical protein | 4.5E−44 | MTH_1868 | conserved protein | 1.4E−15 |
| MSM1131 | Msp_1524 | conserved hypothetical protein | 1.1E−56 | MTH_1306 | conserved protein | 1.1E−59 |
| MSM1132 | Msp_1525 | ribosome biogenesis protein | 2.3E−15 | MTH_1307 | unknown | 4.0E−16 |
| | | Nop10 | | | | |
| MSM1133 | Msp_1527 | putative translation initiation factor | 3.4E−94 | NONE | translation initiation factor | 3.5E−104 |
| | | 2, alpha subunit (alF-2alpha) | | | eIF-2, alpha subunit | |
| | | (eIF2A) | | | | |
| MSM1134 | Msp_1528 | 30S ribosomal protein S27e | 2.3E−17 | MTH_1309 | ribosomal protein S27 | 8.1E−18 |
| MSM1135 | Msp_1529 | 50S ribosomal protein L44e | 1.6E−41 | MTH_1310 | ribosomal protein L36a | 2.7E−42 |
| MSM1136 | Msp_1530 | partially conserved hypothetical | 1.6E−30 | MTH_1311 | unknown | 2.1E−49 |
| | | protein | | | | |
| MSM1137 | Msp_1531 | DNA polymerase sliding clamp | 1.5E−73 | MTH_1312 | proliferating-cell nuclear | 6.0E−93 |
| | | (PCNA) | | | antigen | |
| MSM1138 | Msp_0580 | predicted glutamine | 5.2E−73 | MTH_787 | cobyric acid synthase | 9.2E−10 |
| | | amidotransferase | | | | |
| MSM1139 | Msp_0581 | predicted UDP-N-acetylmuramyl | 3.6E−90 | MTH_530 | UDP-N-acetylmuramyl | 6.8E−16 |
| | | tripeptide synthase | | | tripeptide synthetase | |
| | | | | | related protein | |
| MSM1140 | Msp_0417 | hypothetical membrane-spanning | 2.7E−04 | NONE | | |
| | | protein | | | | |
| MSM1141 | Msp_1075 | TrpA | 7.3E−44 | NONE | tryptophan synthase, | 6.5E−48 |
| | | | | | subunit alpha | |
| MSM1142 | Msp_1074 | TrpB | 6.4E−123 | NONE | tryptophan synthase, | 1.3E−120 |
| | | | | | beta subunit | |
| MSM1143 | Msp_1072 | TrpC | 1.7E−42 | MTH_1657 | indole-3-glycerol | 1.4E−38 |
| | | | | | phosphate synthase | |
| MSM1144 | Msp_1076 | TrpD | 2.0E−71 | MTH_1661 | anthranilate | 2.3E−68 |
| | | | | | phosphoribosyltransferase | |
| MSM1145 | Msp_1071 | TrpG | 7.4E−51 | MTH_1656 | anthranilate synthase | 1.1E−43 |
| | | | | | component II | |
| MSM1146 | Msp_1070 | TrpE | 6.5E−78 | MTH_1655 | anthranilate synthase | 9.9E−84 |
| | | | | | component I | |
| MSM1147 | NONE | | | NONE | | |
| MSM1148 | NONE | | | MTH_1189 | conserved protein | 8.2E−08 |
| MSM1149 | Msp_0607 | hypothetical membrane-spanning | 6.0E−33 | MTH_1192 | conserved protein | 2.8E−31 |
| | | protein | | | | |
| MSM1150 | Msp_0608 | predicted transcriptional regulator | 9.4E−19 | MTH_1328 | conserved protein | 1.3E−17 |
| MSM1151 | Msp_1247 | PurB | 6.0E−159 | MTH_1537 | adenylosuccinate lyase | 8.4E−174 |
| MSM1152 | Msp_0879 | hypothetical membrane-spanning | 2.8E−04 | MTH_1538 | unknown | 6.4E−25 |
| | | protein | | | | |
| MSM1153 | Msp_0224 | predicted cation transport ATPase | 1.1E−205 | MTH_1535 | heavy-metal transporting | 5.1E−199 |
| | | | | | CPx-type ATPase | |
| MSM1154 | Msp_0200 | predicted metal-dependent | 1.2E−07 | MTH_1534 | aryldialkylphosphatase | 5.0E−89 |
| | | hydrolase | | | related protein | |
| MSM1155 | Msp_0225 | conserved hypothetical protein | 1.4E−40 | MTH_1530 | conserved protein | 1.7E−42 |
| MSM1156 | Msp_0221 | TruD | 6.2E−125 | MTH_1529 | conserved protein | 4.6E−134 |
| MSM1157 | Msp_1512 | hypothetical membrane-spanning | 3.5E−05 | MTH_1526 | conserved protein | 8.9E−04 |
| | | protein | | | | |
| MSM1158 | Msp_1511 | HypE2 | 8.9E−126 | MTH_1525 | hydrogenase | 4.2E−156 |
| | | | | | expression/formation | |
| | | | | | protein HypE related | |
| | | | | | protein | |
| MSM1159 | Msp_1510 | HisH | 3.0E−38 | MTH_1524 | imidazoleglycerol- | 9.1E−58 |
| | | | | | phosphate synthase | |
| MSM1160 | Msp_1461 | predicted nitrogenase | 3.8E−118 | MTH_1522 | nitrogenase alpha chain | 8.9E−131 |
| | | molybdenum-iron protein | | | (NifD) related protein | |
| MSM1161 | Msp_0719 | partially conserved hypothetical | 2.8E−05 | NONE | | |
| | | membrane-spanning protein | | | | |
| MSM1162 | NONE | | | NONE | | |
| MSM1163 | NONE | | | NONE | | |
| MSM1164 | Msp_1463 | predicted GTPase | 1.4E−143 | MTH_1515 | GTP-binding protein | 2.4E−153 |
| MSM1165 | Msp_1472 | predicted phosphohydrolase | 2.2E−67 | MTH_1179 | conserved protein | 9.0E−10 |
| MSM1166 | Msp_1474 | conserved hypothetical membrane- | 1.5E−146 | NONE | | |
| | | spanning protein | | | | |
| MSM1167 | Msp_1464 | CbiE | 6.8E−48 | MTH_1514 | precorrin-6Y methylase | 3.9E−50 |
| MSM1168 | Msp_0590 | member of asn/thr-rich large | 1.7E−16 | MTH_75 | surface protease related | 2.1E−11 |
| | | protein family | | | protein | |
| MSM1169 | NONE | | | NONE | | |
| MSM1170 | Msp_0169 | putative arsenical prump-driving | 5.3E−96 | MTH_1511 | arsenical pump-driving | 6.9E−108 |
| | | ATPase | | | ATPase | |
| MSM1171 | Msp_0170 | NadE | 1.1E−63 | MTH_1510 | NH(3)-dependent NAD+ | 1.3E−60 |
| | | | | | synthetase | |
| MSM1172 | Msp_0171 | LeuS | 0.0E+00 | MTH_1508 | leucyl-tRNA synthetase | 0.0E+00 |
| MSM1173 | Msp_0004 | predicted tRNA(1- | 1.0E−62 | MTH_1414 | protein-L-isoaspartate | 1.4E−77 |
| | | methyladenosine) | | | methyltransferase | |
| | | methyltransferase | | | homolog | |
| MSM1174 | Msp_0309 | HtpX | 1.8E−38 | MTH_569 | heat shock protein X | 2.1E−67 |
| MSM1175 | Msp_0548 | hypothetical membrane-spanning | 6.6E−11 | NONE | | |
| | | protein | | | | |
| MSM1176 | Msp_0413 | RfcS | 2.2E−115 | NONE | replication factor C, small | 3.7E−125 |
| | | | | | subunit | |
| MSM1177 | Msp_0414 | RfcL | 1.1E−113 | NONE | replication factor C, large | 3.8E−123 |
| | | | | | subunit | |
| MSM1178 | Msp_0578 | conserved hypothetical protein | 4.1E−34 | MTH_239 | unknown | 9.7E−38 |
| MSM1179 | Msp_0647 | AroE | 1.8E−72 | MTH_242 | shikimate 5- | 1.2E−71 |
| | | | | | dehydrogenase | |
| MSM1180 | NONE | | | MTH_1189 | conserved protein | 1.6E−08 |
| MSM1181 | Msp_0648 | HisS | 5.1E−114 | MTH_244 | histidyl-tRNA synthetase | 3.8E−130 |
| MSM1182 | Msp_0649 | HisI | 1.6E−39 | MTH_245 | phosphoribosyl-AMP | 1.0E−40 |
| | | | | | cyclohydrolase | |
| MSM1183 | Msp_0650 | predicted ATPase | 1.5E−155 | MTH_246 | twitching mobility (PilT) | 8.0E−185 |
| | | | | | related protein | |
| MSM1184 | Msp_0651 | predicted sugar phosphate | 8.7E−48 | MTH_247 | conserved protein | 4.5E−49 |
| | | isomerase/epimerase or | | | | |
| | | endonuclease | | | | |
| MSM1185 | Msp_1499 | putative methylated-DNA--protein- | 1.3E−12 | MTH_618 | O6-methylguanidine- | 2.8E−15 |
| | | cysteine methyltransferase | | | DNA methyltransferase | |
| MSM1186 | Msp_1489 | predicted potassium transport | 9.9E−111 | NONE | | |
| | | system, membrane component | | | | |
| MSM1187 | Msp_0007 | predicted ERCC4-like helicase | 5.4E−213 | NONE | ATP-dependent RNA | 3.5E−241 |
| | | | | | helicase, eIF-4A family | |
| MSM1188 | Msp_0590 | member of asn/thr-rich large | 1.4E−49 | MTH_716 | cell surface glycoprotein | 6.9E−13 |
| | | protein family | | | (s-layer protein) | |
| MSM1189 | Msp_0017 | conserved hypothetical protein | 1.7E−28 | NONE | | |
| MSM1190 | Msp_1211 | partially conserved hypothetical | 6.7E−128 | MTH_530 | UDP-N-acetylmuramyl | 3.1E−57 |
| | | membrane-spanning protein | | | tripeptide synthetase | |
| | | | | | related protein | |
| MSM1191 | Msp_1212 | predicted UDP-N- | 7.9E−102 | MTH_531 | UDP-N-acetylmuramyl | 1.3E−40 |
| | | acetylmuramoylalanine--D- | | | tripeptide synthetase | |
| | | glutamate ligase | | | related protein | |
| MSM1192 | Msp_0008 | conserved hypothetical protein | 9.1E−124 | MTH_1421 | conserved protein | 5.0E−137 |
| MSM1193 | Msp_0009 | putative single-stranded-DNA- | 9.9E−111 | MTH_1422 | conserved protein | 9.3E−136 |
| | | specific exonuclease | | | | |
| MSM1194 | Msp_0010 | 30S ribosomal protein S15P | 5.3E−48 | MTH_1423 | ribosomal protein S13 | 2.1E−49 |
| | | | | | (E. coli) | |
| MSM1195 | Msp_0011 | putative xanthosine triphosphate | 1.9E−61 | MTH_1424 | conserved protein | 1.2E−62 |
| | | pyrophosphatase | | | | |
| MSM1196 | Msp_0635 | cell division control protein 6-like 2 | 9.7E−06 | NONE | | |
| MSM1197 | NONE | | | NONE | | |
| MSM1198 | Msp_0013 | putative O-sialoglycoprotein | 7.7E−159 | MTH_1425 | O-sialoglycoprotein | 1.9E−174 |
| | | endopeptidase | | | endopeptidase | |
| MSM1199 | Msp_0999 | hypothetical protein | 7.0E−06 | NONE | | |
| MSM1200 | Msp_0012 | predicted | 1.4E−88 | MTH_1426 | conserved protein | 3.4E−99 |
| | | phosphoribosyltransferase | | | | |
| MSM1201 | Msp_0014 | UppP | 6.0E−72 | MTH_1428 | bacitracin resistance | 1.1E−43 |
| | | | | | protein | |
| MSM1202 | Msp_0015 | IlvE | 4.0E−114 | MTH_1430 | branched-chain amino- | 5.2E−110 |
| | | | | | acid aminotransferase | |
| MSM1203 | Msp_0724 | hypothetical membrane-spanning | 6.7E−09 | MTH_470 | conserved protein | 7.9E−05 |
| | | protein | | | | |
| MSM1204 | Msp_0163 | F420-dependent | 4.0E−82 | NONE | coenzyme F420- | 2.2E−102 |
| | | methylenetetrahydromethanopterin | | | dependent N5,N10- | |
| | | dehydrogenase | | | methylene | |
| | | | | | tetrahydromethanopterin | |
| | | | | | dehydrogenase | |
| MSM1205 | Msp_0417 | hypothetical membrane-spanning | 5.3E−04 | MTH_1490 | unknown | 3.5E−17 |
| | | protein | | | | |
| MSM1206 | Msp_0164 | HisB | 2.5E−57 | MTH_1467 | imidazoleglycerol- | 9.7E−54 |
| | | | | | phosphate dehydratase | |
| MSM1207 | NONE | | | MTH_1470 | molybdenum transport | 2.2E−17 |
| | | | | | protein ModA related | |
| | | | | | protein | |
| MSM1208 | Msp_0165 | predicted polysaccharide | 5.0E−116 | MTH_1471 | O-antigen transporter | 3.2E−87 |
| | | biosynthesis protein | | | homolog | |
| MSM1209 | Msp_0540 | predicted multimeric flavodoxin | 6.7E−25 | MTH_1473 | conserved protein | 4.7E−54 |
| MSM1210 | Msp_0925 | predicted arabinose efflux | 7.5E−22 | MTH_195 | efflux pump antibiotic | 2.5E−24 |
| | | permease | | | resistance protein | |
| MSM1211 | Msp_0260 | hypothetical protein | 4.6E−16 | MTH_1626 | phosphoserine | 4.3E−06 |
| | | | | | phosphatase | |
| MSM1212 | NONE | | | NONE | | |
| MSM1213 | Msp_1498 | formaldehyde activating enzyme | 8.3E−162 | MTH_1474 | D-arabino 3-hexulose 6- | 6.3E−169 |
| | | fused to 3-hexulose-6phosphate | | | phosphate formaldehyde | |
| | | synthase | | | lyase related protein | |
| MSM1214 | Msp_1573 | ThrS | 7.3E−202 | MTH_1455 | threonyl-tRNA | 1.3E−225 |
| | | | | | synthetase | |
| MSM1215 | Msp_0162 | CbiA | 1.7E−147 | NONE | cobyrinic acid a,c- | 9.4E−143 |
| | | | | | diamide synthase | |
| MSM1216 | Msp_0166 | conserved hypothetical membrane- | 1.3E−74 | MTH_1461 | conserved protein | 2.1E−67 |
| | | spanning protein | | | | |
| MSM1217 | Msp_0019 | partially conserved hypothetical | 5.0E−45 | MTH_1434 | unknown | 1.3E−55 |
| | | protein | | | | |
| MSM1218 | Msp_0020 | SurE | 1.2E−68 | MTH_1435 | survival protein SurE | 1.5E−73 |
| MSM1219 | NONE | | | NONE | | |
| MSM1220 | NONE | | | MTH_1440 | unknown | 8.6E−14 |
| MSM1221 | Msp_0021 | conserved hypothetical protein | 5.2E−89 | MTH_1441 | conserved protein | 3.4E−106 |
| MSM1222 | Msp_0022 | IlvC | 6.9E−126 | MTH_1442 | ketol-acid | 2.7E−122 |
| | | | | | reductoisomerase | |
| MSM1223 | Msp_0591 | predicted carbonic anhydrase | 8.1E−13 | MTH_1582 | carbonic anhydrase | 3.7E−38 |
| MSM1224 | Msp_0025 | IlvH1 | 1.1E−45 | NONE | acetolactate synthase, | 4.1E−55 |
| | | | | | small subunit | |
| MSM1225 | Msp_0026 | IlvB1 | 6.3E−180 | NONE | acetolactate synthase, | 3.5E−207 |
| | | | | | large subunit | |
| MSM1226 | Msp_0031 | ArgF | 2.3E−102 | MTH_1446 | ornithine | 4.6E−102 |
| | | | | | carbamoyltransferase | |
| MSM1227 | Msp_0030 | PurD | 1.1E−150 | MTH_1445 | glycinamide | 4.2E−147 |
| | | | | | ribonucleotide | |
| | | | | | synthetase | |
| MSM1228 | Msp_0513 | predicted Na+-driven multidrug | 5.6E−108 | MTH_314 | conserved protein | 2.8E−95 |
| | | efflux pump | | | | |
| MSM1229 | Msp_0513 | predicted Na+-driven multidrug | 1.1E−125 | MTH_314 | conserved protein | 3.1E−105 |
| | | efflux pump | | | | |
| MSM1230 | Msp_0512 | predicted transcriptional regulator | 5.3E−25 | MTH_313 | transcriptional regulator | 2.2E−17 |
| MSM1231 | Msp_1574 | ArgS | 1.4E−157 | MTH_1447 | arginyl-tRNA synthetase | 9.3E−175 |
| MSM1232 | Msp_1575 | putative signal peptidase | 3.6E−42 | MTH_1448 | signal peptidase | 2.7E−42 |
| MSM1233 | Msp_1180 | HemL | 5.8E−138 | MTH_228 | glutamate-1- | 2.1E−136 |
| | | | | | semialdehyde | |
| | | | | | aminotransferase | |
| MSM1234 | Msp_1179 | CbiC | 8.2E−68 | MTH_227 | precorrin isomerase | 7.1E−58 |
| MSM1235 | Msp_0093 | predicted flavoprotein | 2.5E−59 | NONE | | |
| MSM1236 | Msp_0135 | AspS | 1.9E−164 | MTH_226 | aspartyl-tRNA | 1.2E−165 |
| | | | | | synthetase | |
| MSM1237 | Msp_1576 | IlvD | 7.2E−195 | MTH_1449 | dihydroxy-acid | 3.4E−177 |
| | | | | | dehydratase | |
| MSM1238 | Msp_0134 | HisD | 2.7E−131 | MTH_225 | histidinol dehydrogenase | 2.7E−138 |
| MSM1239 | Msp_1569 | predicted DNA-binding protein | 2.7E−92 | MTH_1458 | unknown | 5.1E−96 |
| MSM1240 | Msp_1570 | conserved hypothetical protein | 8.9E−23 | MTH_1457 | unknown | 3.0E−24 |
| MSM1241 | Msp_1571 | predicted ATPase | 5.2E−82 | MTH_1456 | chromosome partitioning | 1.9E−73 |
| | | | | | protein Soj | |
| MSM1242 | Msp_1074 | TrpB | 7.2E−37 | NONE | tryptophan synthase, | 1.0E−168 |
| | | | | | beta subunit homolog | |
| MSM1243 | NONE | | | MTH_1477 | unknown | 3.1E−73 |
| MSM1244 | Msp_1491 | predicted metal-dependent | 1.9E−45 | MTH_1478 | conserved protein | 8.9E−28 |
| | | phosphoesterase | | | | |
| MSM1245 | Msp_0198 | AlbA | 2.2E−26 | MTH_1483 | conserved protein | 3.8E−27 |
| MSM1246 | Msp_0199 | LeuA1 | 8.3E−162 | MTH_1481 | isopropylmalate synthase | 2.8E−175 |
| MSM1247 | Msp_0197 | conserved hypothetical membrane- | 2.6E−78 | MTH_1485 | serine/threonine protein | 1.2E−92 |
| | | spanning protein | | | kinase related protein | |
| MSM1248 | Msp_0196 | ABC-type multidrug transport | 4.6E−74 | MTH_1486 | conserved protein | 1.5E−82 |
| | | system, permease protein | | | | |
| MSM1249 | Msp_0195 | ABC-type multidrug transport | 1.6E−94 | MTH_1487 | ABC transporter (ATP- | 5.1E−103 |
| | | system, ATP-binding protein | | | binding | |
| MSM1250 | Msp_0194 | predicted transcriptional regulator | 3.6E−19 | MTH_1488 | unknown | 1.6E−19 |
| MSM1251 | Msp_0651 | predicted sugar phosphate | 7.5E−26 | MTH_1489 | conserved protein | 8.8E−60 |
| | | isomerase/epimerase or | | | | |
| | | endonuclease | | | | |
| MSM1252 | Msp_0191 | MapB | 8.0E−38 | MTH_1493 | cation transporting P- | 1.8E−54 |
| | | | | | type ATPase related | |
| | | | | | protein | |
| MSM1253 | Msp_0181 | GatA | 2.1E−165 | MTH_1496 | amidase | 1.1E−164 |
| MSM1254 | Msp_0174 | predicted cobyric acid synthase | 7.3E−115 | NONE | cobyrinic acid a,c- | 8.9E−115 |
| | | | | | diamide synthase related | |
| | | | | | protein | |
| MSM1255 | NONE | | | NONE | | |
| MSM1256 | Msp_0175 | RibB | 2.5E−59 | MTH_1499 | GTP cyclohydrolase II | 2.8E−63 |
| MSM1257 | Msp_0177 | predicted transcriptional regulator | 1.7E−19 | MTH_1500 | conserved protein | 9.4E−24 |
| MSM1258 | Msp_0180 | TfrA | 2.0E−174 | NONE | succinate | 3.9E−185 |
| | | | | | dehydrogenase, | |
| | | | | | flavoprotein subunit | |
| MSM1259 | Msp_0200 | predicted metal-dependent | 1.0E−115 | MTH_1505 | N-ethylammeline | 9.3E−120 |
| | | hydrolase | | | chlorohydrolase homolog | |
| MSM1260 | Msp_0383 | archaeal histone | 8.8E−16 | MTH_1696 | histone HMtA2 | 8.4E−16 |
| MSM1261 | Msp_0178 | HisG | 1.4E−88 | MTH_1506 | ATP | 1.3E−90 |
| | | | | | phosphoribosyltransferase | |
| MSM1262 | NONE | | | NONE | | |
| MSM1263 | Msp_0003 | PyrB | 8.4E−98 | MTH_1413 | aspartate | 5.1E−96 |
| | | | | | carbamoyltransferase | |
| MSM1264 | Msp_0001 | cell division control protein 6-like 1 | 4.9E−141 | MTH_1412 | Cdc6 related protein | 8.2E−160 |
| MSM1265 | NONE | | | MTH_1410 | unknown | 1.4E−31 |
| MSM1266 | Msp_1588 | CobD | 4.4E−76 | MTH_1409 | cobalamin biosynthesis | 7.6E−54 |
| | | | | | protein B | |
| MSM1267 | Msp_1587 | CbiG | 2.3E−70 | MTH_1408 | cobalamin biosynthesis | 3.0E−50 |
| | | | | | protein G | |
| MSM1268 | Msp_1586 | conserved hypothetical protein | 2.7E−21 | MTH_1407 | conserved protein | 2.6E−28 |
| MSM1269 | NONE | | | NONE | | |
| MSM1270 | Msp_1585 | predicted class II aldolase | 4.7E−40 | MTH_1406 | fuculose-1-phosphate | 4.9E−43 |
| | | | | | aldolase | |
| MSM1271 | Msp_1584 | PolB | 4.5E−131 | MTH_1405 | DNA polymerase delta | 3.6E−156 |
| | | | | | small subunit | |
| MSM1272 | Msp_1583 | hypothetical membrane-spanning | 5.8E−19 | MTH_1404 | unknown | 4.3E−28 |
| | | protein | | | | |
| MSM1273 | Msp_1582 | CbiH | 2.5E−98 | MTH_1403 | precorrin-3 methylase | 1.2E−101 |
| MSM1274 | NONE | | | MTH_1402 | conserved protein | 6.4E−73 |
| MSM1275 | Msp_0962 | hypothetical membrane-spanning | 2.4E−04 | MTH_1401 | unknown | 5.4E−108 |
| | | protein | | | | |
| MSM1276 | Msp_1558 | hypothetical protein | 1.7E−10 | MTH_1400 | unknown | 1.3E−16 |
| MSM1277 | Msp_1559 | conserved hypothetical membrane- | 8.0E−38 | MTH_1399 | unknown | 2.0E−46 |
| | | spanning protein | | | | |
| MSM1278 | Msp_0757 | predicted ATPase | 4.3E−101 | NONE | | |
| MSM1279 | Msp_1562 | conserved hypothetical protein | 1.5E−50 | MTH_1398 | conserved protein | 2.3E−52 |
| MSM1280 | Msp_1561 | conserved hypothetical protein | 5.0E−52 | MTH_1397 | conserved protein | 1.2E−25 |
| MSM1281 | Msp_1563 | CbiX | 7.5E−42 | MTH_1397 | conserved protein | 8.6E−30 |
| MSM1282 | Msp_0590 | member of asn/thr-rich large | 3.1E−13 | MTH_716 | cell surface glycoprotein | 2.7E−05 |
| | | protein family | | | (s-layer protein) | |
| MSM1283 | Msp_1564 | ThiL | 6.8E−48 | MTH_1396 | thiamine monphosphate | 3.1E−57 |
| | | | | | kinase | |
| MSM1284 | Msp_1565 | predicted pyruvate-formate lyase- | 1.5E−66 | MTH_1395 | pyruvate formate-lyase | 3.5E−81 |
| | | activating enzyme | | | activating enzyme | |
| | | | | | related protein | |
| MSM1285 | Msp_0615 | partially conserved hypothetical | 6.8E−05 | NONE | | |
| | | membrane-spanning protein | | | | |
| MSM1286 | Msp_1479 | predicted 3-octaprenyl-4- | 5.7E−147 | MTH_1394 | conserved protein | 3.5E−152 |
| | | hydroxybenzoate carboxy-lyase | | | | |
| MSM1287 | Msp_1480 | PurE | 6.4E−68 | MTH_1393 | phosphoribosylaminoimidazole | 1.9E−80 |
| | | | | | carboxylase | |
| MSM1288 | NONE | | | NONE | | |
| MSM1289 | Msp_1168 | CobS | 6.5E−04 | NONE | | |
| MSM1290 | Msp_0054 | predicted glycosyltransferase | 1.4E−33 | MTH_374 | dolichyl-phosphate | 7.5E−31 |
| | | | | | mannose synthase | |
| | | | | | related protein | |
| MSM1291 | NONE | | | NONE | | |
| MSM1292 | Msp_0920 | predicted transcriptional accessory | 9.5E−232 | NONE | translation initiation | 2.1E−04 |
| | | protein | | | factor eIF-2, alpha | |
| | | | | | subunit | |
| MSM1293 | Msp_0965 | predicted nitroreductase | 3.3E−16 | MTH_120 | NADPH-oxidoreductase | 2.1E−33 |
| MSM1294 | Msp_1481 | conserved hypothetical membrane- | 3.4E−124 | MTH_1392 | dolichyl-phosphate | 5.8E−150 |
| | | spanning protein | | | mannoosyltransferase | |
| | | | | | related protein | |
| MSM1295 | Msp_1482 | conserved hypothetical membrane- | 7.0E−94 | MTH_1391 | conserved protein | 3.8E−114 |
| | | spanning protein | | | | |
| MSM1296 | Msp_1483 | RibH | 2.0E−50 | MTH_1390 | riboflavin synthase beta | 1.4E−54 |
| | | | | | subunit | |
| MSM1297 | Msp_0219 | conserved hypothetical protein | 3.0E−70 | NONE | | |
| MSM1298 | Msp_1484 | LeuB | 3.8E−109 | MTH_1388 | 3-isopropylmalate | 3.2E−103 |
| | | | | | dehydrogenase | |
| MSM1299 | Msp_1485 | LeuD1 | 3.1E−43 | NONE | 3-isopropylmalate | 3.3E−60 |
| | | | | | dehydratase, LeuC | |
| | | | | | subunit | |
| MSM1300 | Msp_1486 | LeuC1 | 1.3E−165 | NONE | 3-isopropylmalate | 1.7E−175 |
| | | | | | dehydratase, LeuD | |
| | | | | | subunit | |
| MSM1301 | NONE | | | NONE | | |
| MSM1302 | NONE | | | NONE | | |
| MSM1303 | Msp_0214 | predicted UDP-N-acetyl-D- | 2.3E−143 | MTH_836 | UDP-N-acetyl-D- | 2.8E−79 |
| | | mannosaminuronate | | | mannosaminuronic acid | |
| | | dehydrogenase | | | dehydrogenase | |
| MSM1304 | Msp_1116 | predicted dTDP-4- | 9.6E−42 | MTH_1792 | dTDP-4- | 1.9E−73 |
| | | dehydrorhamnose reductase | | | dehydrorhamnose | |
| | | | | | reductase | |
| MSM1305 | Msp_0762 | member of asn/thr-rich large | 5.3E−36 | MTH_716 | cell surface glycoprotein | 2.2E−12 |
| | | protein family | | | (s-layer protein) | |
| MSM1306 | Msp_0590 | member of asn/thr-rich large | 3.5E−45 | MTH_716 | cell surface glycoprotein | 1.8E−07 |
| | | protein family | | | (s-layer protein) | |
| MSM1307 | Msp_1102 | predicted dTDP-glucose | 4.1E−41 | MTH_1791 | glucose-1-phosphate | 1.4E−123 |
| | | pyrophosphorylase | | | thymidylyltransferase | |
| MSM1308 | Msp_0539 | predicted dTDP-4- | 1.9E−68 | NONE | dTDP-4- | 5.4E−60 |
| | | dehydrorhamnose 3,5-epimerase | | | dehydrorhamnose 3,5- | |
| | | | | | epimerase | |
| MSM1309 | Msp_1114 | predicted dTDP-D-glucose 4,6- | 4.5E−106 | NONE | dTDP-glucose 4,6- | 3.0E−137 |
| | | dehydratase | | | dehydratase | |
| MSM1310 | Msp_0212 | predicted glycosyltransferase | 1.8E−54 | MTH_884 | teichoic acid biosynthesis | 7.1E−10 |
| | | | | | related protein | |
| MSM1311 | Msp_0496 | predicted glycosyltransferase | 2.8E−34 | MTH_136 | dolichyl-phosphate | 2.2E−05 |
| | | | | | mannose synthase | |
| MSM1312 | Msp_0500 | predicted glycosyltransferase | 4.8E−79 | MTH_172 | conserved protein | 6.5E−19 |
| MSM1313 | Msp_0492 | predicted glycosyltransferase | 6.1E−57 | MTH_338 | LPS biosynthesis RfbU | 2.9E−07 |
| | | | | | related protein | |
| MSM1314 | NONE | | | NONE | | |
| MSM1315 | NONE | | | NONE | | |
| MSM1316 | Msp_0495 | predicted glycosyltransferase | 2.3E−33 | MTH_884 | teichoic acid biosynthesis | 8.9E−09 |
| | | | | | related protein | |
| MSM1317 | Msp_0500 | predicted glycosyltransferase | 2.9E−07 | NONE | | |
| MSM1318 | Msp_0927 | hypothetical protein | 2.1E−30 | NONE | | |
| MSM1319 | Msp_0928 | hypothetical protein | 3.0E−31 | NONE | | |
| MSM1320 | Msp_0492 | predicted glycosyltransferase | 4.1E−58 | NONE | | |
| MSM1321 | Msp_0500 | predicted glycosyltransferase | 4.4E−76 | MTH_172 | conserved protein | 9.5E−17 |
| MSM1322 | Msp_0492 | predicted glycosyltransferase | 6.5E−62 | MTH_338 | LPS biosynthesis RfbU | 9.6E−12 |
| | | | | | related protein | |
| MSM1323 | Msp_0495 | predicted glycosyltransferase | 5.3E−34 | MTH_884 | teichoic acid biosynthesis | 2.0E−08 |
| | | | | | related protein | |
| MSM1324 | Msp_0215 | predicted glycosyltransferase | 1.0E−32 | MTH_884 | teichoic acid biosynthesis | 1.5E−08 |
| | | | | | related protein | |
| MSM1325 | Msp_0204 | predicted ABC-type | 1.2E−64 | MTH_1092 | putative membrane | 6.6E−06 |
| | | polysaccharide/polyol phosphate | | | protein | |
| | | export system, permease protein | | | | |
| MSM1326 | Msp_0205 | predicted ABC-type | 3.7E−79 | MTH_1370 | ABC transporter (ATP- | 2.0E−16 |
| | | polysaccharide/polyol phosphate | | | binding protein) | |
| | | export system, ATP-binding protein | | | | |
| MSM1327 | NONE | | | MTH_361 | teichoic acid biosynthesis | 2.4E−17 |
| | | | | | protein RodC related | |
| | | | | | protein | |
| MSM1328 | Msp_0212 | predicted glycosyltransferase | 2.9E−26 | MTH_884 | teichoic acid biosynthesis | 2.0E−12 |
| | | | | | related protein | |
| MSM1329 | Msp_0206 | predicted glycosyltransferase | 5.2E−82 | MTH_172 | conserved protein | 2.5E−46 |
| MSM1330 | Msp_0207 | predicted glycosyltransferase | 9.1E−69 | MTH_172 | conserved protein | 1.1E−20 |
| MSM1331 | Msp_0208 | predicted bacterial sugar | 9.0E−117 | NONE | | |
| | | transferase | | | | |
| MSM1332 | Msp_1487 | predicted ssDNA-binding protein | 6.2E−157 | MTH_1385 | replication factor A | 7.8E−152 |
| | | | | | related protein | |
| MSM1333 | Msp_1488 | RadA | 6.9E−142 | MTH_1383 | DNA repair protein RadA | 6.4E−144 |
| MSM1334 | Msp_1477 | predicted permease | 1.4E−56 | MTH_1382 | conserved protein | 1.2E−57 |
| MSM1335 | NONE | | | NONE | | |
| MSM1336 | Msp_1476 | HdrA1 | 6.9E−277 | NONE | heterodisulfide | 2.0E−298 |
| | | | | | reductase, subunit A | |
| MSM1337 | Msp_1475 | GlyA | 5.9E−145 | MTH_1380 | serine | 6.5E−151 |
| | | | | | hydroxymethyltransferase | |
| MSM1338 | Msp_1473 | predicted flavoprotein | 3.4E−53 | MTH_1379 | conserved protein | 5.0E−73 |
| | | | | | (contains ferredoxin | |
| | | | | | domain) | |
| MSM1339 | Msp_1471 | conserved hypothetical protein | 2.5E−11 | MTH_1377 | conserved protein | 9.7E−22 |
| MSM1340 | Msp_1470 | S-adenosylmethionine synthetase | 2.2E−138 | MTH_1376 | conserved protein | 3.7E−148 |
| MSM1341 | Msp_1468 | IleS | 0.0E+00 | MTH_1375 | isoleucyl-tRNA | 0.0E+00 |
| | | | | | synthetase | |
| MSM1342 | Msp_1467 | PurL | 5.9E−239 | MTH_1374 | phosphoribosylformylglycinamidine | 4.4E−255 |
| | | | | | synthase II | |
| MSM1343 | NONE | | | MTH_1369 | molybdenum cofactor | 2.5E−110 |
| | | | | | biosynthesis MoeA | |
| MSM1344 | Msp_1466 | predicted membrane-associated | 1.4E−81 | MTH_1368 | conserved protein | 3.4E−99 |
| | | Zn-dependent protease | | | | |
| MSM1345 | NONE | | | NONE | | |
| MSM1346 | Msp_0822 | hypothetical protein | 1.6E−06 | NONE | | |
| MSM1347 | NONE | | | NONE | | |
| MSM1348 | Msp_0789 | rubrerythrin | 2.7E−04 | MTH_1351 | conserved protein | 4.2E−37 |
| MSM1349 | Msp_0787 | FprA | 2.9E−136 | MTH_1350 | flavoprotein AI | 2.7E−152 |
| MSM1350 | Msp_0061 | conserved hypothetical protein | 5.4E−32 | MTH_1349 | conserved protein | 3.1E−48 |
| MSM1351 | Msp_0038 | CbiL | 1.1E−58 | MTH_1348 | precorrin-2 | 9.8E−61 |
| | | | | | methyltransferase | |
| MSM1352 | Msp_0036 | putative ATP-dependent helicase | 1.1E−175 | MTH_1347 | probable ATP-dependent | 3.4E−212 |
| | | | | | helicase | |
| MSM1353 | Msp_1532 | hypothetical membrane-spanning | 1.6E−08 | MTH_1313 | unknown | 9.0E−13 |
| | | protein | | | | |
| MSM1354 | Msp_1533 | RpoM1 | 4.7E−33 | MTH_1314 | transcription elongation | 4.8E−36 |
| | | | | | factor TFIIS | |
| MSM1355 | Msp_1534 | putative ADP-ribose | 4.9E−38 | MTH_1315 | mutator MutT protein | 1.1E−34 |
| | | pyrophosphatase | | | | |
| MSM1356 | Msp_1535 | RpoL | 2.1E−14 | NONE | DNA-dependent RNA | 5.5E−19 |
| | | | | | polymerase, subunit L | |
| MSM1357 | Msp_1536 | predicted RNA-binding protein | 2.6E−32 | MTH_1318 | conserved protein | 1.6E−46 |
| MSM1358 | Msp_1537 | predicted diphthamide synthase, | 6.1E−95 | MTH_1319 | conserved protein | 1.1E−109 |
| | | subunit DPH2 | | | | |
| MSM1359 | Msp_1538 | putative adenine | 5.0E−52 | MTH_1320 | adenine | 2.2E−54 |
| | | phosphoribosyltransferase | | | phosphoribosyltransferase | |
| MSM1360 | Msp_1539 | signal recognition particle, 54 kDa | 2.0E−151 | MTH_1321 | signal recognition particle | 5.8E−159 |
| | | protein | | | protein SRP54 | |
| MSM1361 | Msp_1541 | predicted pseudouridylate synthase | 4.0E−82 | MTH_1322 | conserved protein | 1.0E−104 |
| MSM1362 | NONE | | | MTH_809 | molybdenum cofactor | 2.2E−47 |
| | | | | | biosynthesis protein | |
| | | | | | MoaC | |
| MSM1363 | Msp_0229 | SecG | 2.2E−12 | NONE | | |
| MSM1364 | Msp_0032 | HisF | 1.6E−112 | MTH_1343 | imidazoleglycerol- | 3.7E−109 |
| | | | | | phosphate synthase | |
| | | | | | (cyclase) | |
| MSM1365 | Msp_0034 | putative 3-methyladenine DNA | 2.1E−37 | MTH_1342 | 8-oxoguanine DNA | 1.1E−68 |
| | | glycosylase/8-oxoguanine DNA | | | glycosylase | |
| | | glycosylase | | | | |
| MSM1366 | NONE | | | MTH_758 | S-D-lactoylglutathione | 7.2E−26 |
| | | | | | methylglyoxal lyase | |
| MSM1367 | Msp_0035 | predicted peptidyl-prolyl cis-trans | 2.3E−63 | MTH_1338 | peptidyl-prolyl cis-trans | 1.9E−57 |
| | | isomerase 1 | | | isomerase B | |
| MSM1368 | Msp_0037 | ArgD | 6.6E−121 | MTH_1337 | N-acetylornithine | 8.1E−121 |
| | | | | | aminotransferase | |
| MSM1369 | Msp_0006 | predicted NUDIX-related protein | 4.5E−12 | MTH_1336 | mutator MutT protein | 1.0E−17 |
| | | | | | homolog | |
| MSM1370 | Msp_0715 | conserved hypothetical membrane- | 9.6E−97 | NONE | | |
| | | spanning protein | | | | |
| MSM1371 | Msp_1578 | LysA | 2.9E−152 | MTH_1335 | diaminopimelate | 2.3E−155 |
| | | | | | decarboxylase | |
| MSM1372 | Msp_1579 | DapF | 1.3E−74 | MTH_1334 | diaminopimelate | 2.8E−86 |
| | | | | | epimerase | |
| MSM1373 | Msp_1545 | conserved hypothetical protein | 3.2E−50 | MTH_1329 | methyltransferase related | 4.1E−46 |
| | | | | | protein | |
| MSM1374 | Msp_1544 | KsgA | 1.6E−62 | MTH_1326 | dimethyladenosine | 1.3E−56 |
| | | | | | transferase | |
| MSM1375 | NONE | | | MTH_1325 | conserved protein | 2.9E−61 |
| MSM1376 | Msp_1543 | conserved hypothetical protein | 5.1E−20 | MTH_1324 | conserved protein | 2.1E−28 |
| MSM1377 | Msp_1542 | 50S ribosomal protein L21e | 3.3E−32 | MTH_1323 | ribosomal protein L21 | 2.7E−35 |
| MSM1378 | Msp_0981 | conserved hypothetical protein | 7.4E−19 | NONE | | |
| MSM1379 | Msp_0967 | putative NADP-dependent alcohol | 1.4E−24 | NONE | | |
| | | dehydrogenase | | | | |
| MSM1380 | Msp_0967 | putative NADP-dependent alcohol | 4.6E−74 | NONE | | |
| | | dehydrogenase | | | | |
| MSM1381 | Msp_0967 | putative NADP-dependent alcohol | 2.2E−11 | NONE | | |
| | | dehydrogenase | | | | |
| MSM1382 | Msp_0504 | conserved hypothetical membrane- | 2.7E−53 | NONE | | |
| | | spanning protein | | | | |
| MSM1383 | Msp_0254 | anaerobic ribonucleotide- | 1.6E−307 | MTH_1539 | anaerobic | 9.9E−306 |
| | | triphosphate reductase | | | ribonucleoside- | |
| | | | | | triphosphate reductase | |
| MSM1384 | Msp_0255 | PolC | 3.9E−290 | MTH_1536 | conserved protein | 0.0E+00 |
| MSM1385 | Msp_0113 | conserved hypothetical protein | 7.7E−16 | MTH_1626 | phosphoserine | 2.3E−09 |
| | | | | | phosphatase | |
| MSM1386 | NONE | | | NONE | | |
| MSM1387 | Msp_0249 | LysS | 4.8E−205 | MTH_1542 | conserved protein | 2.6E−202 |
| MSM1388 | Msp_0251 | ThiC2 | 1.0E−156 | MTH_1543 | thiamine biosynthesis | 5.3E−172 |
| | | | | | protein | |
| MSM1389 | Msp_0252 | predicted ribokinase | 1.3E−78 | MTH_1544 | ribokinase | 3.8E−91 |
| MSM1390 | Msp_0248 | conserved hypothetical protein | 2.5E−50 | MTH_1545 | conserved protein | 1.5E−55 |
| MSM1391 | Msp_0247 | predicted sugar phosphate | 1.2E−52 | MTH_1546 | conserved protein | 1.3E−51 |
| | | isomerase | | | | |
| MSM1392 | NONE | | | NONE | nitrate assimilation | 4.4E−58 |
| | | | | | protein, narQ | |
| MSM1393 | NONE | | | NONE | | |
| MSM1394 | Msp_0355 | conserved hypothetical membrane- | 1.5E−04 | NONE | | |
| | | spanning protein | | | | |
| MSM1395 | Msp_0340 | PstB | 3.1E−27 | MTH_605 | ABC transporter | 3.2E−30 |
| MSM1396 | NONE | | | MTH_1345 | conserved protein | 4.7E−22 |
| MSM1397 | Msp_0432 | member of asn/thr-rich large protein | 7.3E−30 | MTH_911 | probable surface protein | 3.0E−12 |
| | | family | | | | |
| MSM1398 | Msp_0762 | member of asn/thr-rich large protein | 4.2E−21 | MTH_716 | cell surface glycoprotein | 2.4E−10 |
| | | family | | | (s-layer protein) | |
| MSM1399 | Msp_0911 | member of asn/thr-rich large protein | 5.8E−13 | MTH_716 | cell surface glycoprotein | 4.7E−13 |
| | | family | | | (s-layer protein) | |
| MSM1400 | Msp_0615 | partially conserved hypothetical | 5.3E−05 | MTH_672 | unknown | 1.6E−04 |
| | | membrane-spanning protein | | | | |
| MSM1401 | Msp_1106 | conserved hypothetical membrane- | 5.9E−42 | MTH_671 | unknown | 1.9E−48 |
| | | spanning protein | | | | |
| MSM1402 | Msp_1107 | conserved hypothetical membrane- | 4.2E−16 | MTH_670 | unknown | 2.4E−11 |
| | | spanning protein | | | | |
| MSM1403 | NONE | | | NONE | | |
| MSM1404 | Msp_0243 | FwdB | 5.2E−23 | NONE | formate dehydrogenase, | 1.9E−153 |
| | | | | | alpha subunit homolog | |
| MSM1405 | Msp_0639 | FdhB | 5.0E−84 | NONE | formate dehydrogenase, | 7.8E−84 |
| | | | | | beta subunit related | |
| | | | | | protein FlpB | |
| MSM1406 | Msp_0384 | predicted Fe—S oxidoreductase | 2.7E−19 | MTH_1550 | molybdenum cofactor | 2.6E−99 |
| | | | | | biosynthesis MoaA | |
| MSM1407 | Msp_0488 | predicted allosteric regulator of | 9.7E−04 | MTH_1551 | molybdopterin-guanine | 2.3E−36 |
| | | homoserine dehydrogenase | | | dinucleotide biosynthesis | |
| | | | | | protein B related | |
| MSM1408 | Msp_0147 | ferredoxin | 7.5E−10 | NONE | tungsten | 8.3E−48 |
| | | | | | formylmethanofuran | |
| | | | | | dehydrogenase, subunit H | |
| MSM1409 | Msp_1447 | EhbK | 6.0E−18 | NONE | tungsten | 3.1E−97 |
| | | | | | formylmethanofuran | |
| | | | | | dehydrogenase, subunit F | |
| MSM1410 | Msp_0241 | FwdG | 1.8E−22 | NONE | tungsten | 2.7E−19 |
| | | | | | formylmethanofuran | |
| | | | | | dehydrogenase, subunit G | |
| MSM1411 | Msp_0242 | FwdD | 5.4E−39 | NONE | tungsten | 6.9E−21 |
| | | | | | formylmethanofuran | |
| | | | | | dehydrogenase, subunit D | |
| MSM1412 | Msp_0243 | FwdB | 1.6E−156 | NONE | tungsten | 5.3E−117 |
| | | | | | formylmethanofuran | |
| | | | | | dehydrogenase, subunit B | |
| MSM1413 | Msp_0244 | FwdA | 6.4E−203 | NONE | tungsten | 1.7E−182 |
| | | | | | formylmethanofuran | |
| | | | | | dehydrogenase, subunit A | |
| MSM1414 | Msp_0245 | FwdC | 1.9E−66 | NONE | tungsten | 2.9E−52 |
| | | | | | formylmethanofuran | |
| | | | | | dehydrogenase, subunit C | |
| MSM1415 | Msp_0246 | hypothetical protein | 3.9E−13 | MTH_1568 | unknown | 1.1E−08 |
| MSM1416 | Msp_0246 | hypothetical protein | 6.8E−09 | MTH_1568 | unknown | 1.6E−05 |
| MSM1417 | Msp_0235 | conserved hypothetical membrane- | 2.9E−150 | MTH_1569 | conserved protein | 6.5E−151 |
| | | spanning protein | | | | |
| MSM1418 | Msp_0234 | GlnA | 3.8E−157 | MTH_1570 | glutamine synthetase | 4.7E−164 |
| MSM1419 | Msp_0017 | conserved hypothetical protein | 1.7E−28 | NONE | | |
| MSM1420 | Msp_0128 | predicted helicase | 5.7E−11 | MTH_511 | DNA helicase II | 1.5E−13 |
| MSM1421 | Msp_1566 | conserved hypothetical membrane- | 4.4E−92 | NONE | | |
| | | spanning protein | | | | |
| MSM1422 | Msp_1568 | conserved hypothetical membrane- | 3.5E−67 | NONE | | |
| | | spanning protein | | | | |
| MSM1423 | Msp_0721 | partially conserved hypothetical | 5.9E−42 | NONE | | |
| | | protein | | | | |
| MSM1424 | Msp_0720 | polyphosphate kinase | 2.4E−258 | NONE | | |
| MSM1425 | Msp_0871 | 30S ribosomal protein S13P | 7.7E−56 | MTH_34 | ribosomal protein S18 | 2.9E−54 |
| | | | | | (E. coli) | |
| MSM1426 | Msp_0870 | 30S ribosomal protein S4P | 6.5E−59 | MTH_35 | ribosomal protein S9 | 4.4E−65 |
| | | | | | (E. coli) | |
| MSM1427 | Msp_0869 | 30S ribosomal protein S11P | 2.5E−59 | MTH_36 | ribosomal protein S14 | 2.9E−61 |
| | | | | | (E. coli) | |
| MSM1428 | Msp_0868 | RpoD | 6.3E−61 | NONE | DNA-dependent RNA | 9.1E−74 |
| | | | | | polymerase, subunit D | |
| MSM1429 | Msp_0867 | 50S ribosomal protein L18e | 1.1E−33 | MTH_38 | ribosomal protein L18 | 5.5E−35 |
| | | | | | (E. coli) | |
| MSM1430 | Msp_0866 | 50S ribosomal protein L13P | 1.3E−51 | MTH_39 | ribosomal protein S16 | 7.1E−58 |
| | | | | | (E. coli) | |
| MSM1431 | Msp_0865 | 30S ribosomal protein S9P | 2.9E−56 | MTH_39 | ribosomal protein S16 | 1.3E−56 |
| | | | | | (E. coli) | |
| MSM1432 | Msp_0864 | RpoN | 9.4E−19 | NONE | DNA-dependent RNA | 1.3E−24 |
| | | | | | polymerase, subunit N | |
| MSM1433 | Msp_0863 | RpoK | 6.9E−16 | NONE | DNA-dependent RNA | 2.4E−18 |
| | | | | | polymerase, subunit K | |
| MSM1434 | NONE | | | NONE | | |
| MSM1435 | Msp_0862 | enolase | 2.2E−113 | MTH_43 | enolase | 3.0E−121 |
| MSM1436 | Msp_0861 | ferredoxin | 3.0E−15 | MTH_1106 | ferredoxin | 6.2E−20 |
| MSM1437 | Msp_0860 | ribosomal protein S2P | 3.9E−84 | MTH_44 | ribosomal protein Sa | 5.5E−83 |
| | | | | | (E. coli) | |
| MSM1438 | Msp_0859 | conserved hypothetical protein | 1.9E−59 | MTH_45 | conserved protein | 5.1E−64 |
| MSM1439 | Msp_0858 | putative mevalonate kinase | 2.1E−60 | MTH_46 | mevalonate kinase | 4.6E−63 |
| MSM1440 | Msp_0857 | predicted archaeal kinase | 9.2E−60 | MTH_47 | conserved protein | 3.6E−70 |
| MSM1441 | Msp_0856 | isopentenyl-diphosphate delta- | 6.2E−118 | MTH_48 | conserved protein | 4.1E−117 |
| | | isomerase | | | | |
| MSM1442 | Msp_0855 | predicted hydrolase | 8.3E−178 | MTH_49 | conserved protein | 8.6E−188 |
| MSM1443 | Msp_0854 | IdsA | 1.3E−90 | MTH_50 | bifunctional short chain | 4.1E−94 |
| | | | | | isoprenyl diphosphate | |
| | | | | | synthase | |
| MSM1444 | NONE | | | NONE | | |
| MSM1445 | Msp_1125 | predicted transcriptional regulator | 1.4E−38 | MTH_1454 | conserved protein | 2.9E−45 |
| MSM1446 | Msp_1126 | putative hydroxylamine reductase | 1.8E−152 | MTH_1453 | 6Fe—6S prismane- | 3.6E−173 |
| | | | | | containing protein | |
| MSM1447 | Msp_0002 | conserved hypothetical protein | 1.1E−31 | MTH_1452 | unknown | 2.3E−36 |
| MSM1448 | Msp_1545 | conserved hypothetical protein | 1.9E−08 | MTH_146 | precorrin-8W | 1.7E−05 |
| | | | | | decarboxylase | |
| MSM1449 | Msp_0219 | conserved hypothetical protein | 7.9E−04 | MTH_83 | O-linked GlcNAc | 9.2E−05 |
| | | | | | transferase | |
| MSM1450 | Msp_0524 | predicted oxidoreductase | 8.4E−25 | MTH_907 | conserved protein | 6.8E−08 |
| MSM1451 | Msp_0039 | predicted glycosyltransferase | 2.2E−06 | MTH_83 | O-linked GlcNAc | 3.2E−10 |
| | | | | | transferase | |
| MSM1452 | Msp_0923 | GltX | 1.1E−184 | MTH_51 | glutamyl-tRNA | 8.5E−181 |
| | | | | | synthetase | |
| MSM1453 | NONE | | | NONE | | |
| MSM1454 | Msp_0226 | hypothetical protein | 9.5E−14 | NONE | heterodisulfide | 6.6E−06 |
| | | | | | reductase, subunit C | |
| MSM1455 | Msp_0924 | predicted | 3.8E−166 | MTH_52 | aspartate | 6.6E−158 |
| | | aspartate/tyrosine/aromatic | | | aminotransferase related | |
| | | aminotransferase | | | protein | |
| MSM1456 | NONE | | | NONE | | |
| MSM1457 | NONE | | | NONE | | |
| MSM1458 | NONE | | | NONE | | |
| MSM1459 | Msp_0925 | predicted arabinose efflux | 7.3E−115 | MTH_195 | efflux pump antibiotic | 7.7E−93 |
| | | permease | | | resistance protein | |
| MSM1460 | Msp_1447 | EhbK | 1.8E−33 | MTH_1133 | polyferredoxin (MvhB) | 5.8E−143 |
| MSM1461 | Msp_0638 | MvhD2 | 1.3E−53 | NONE | methyl viologen-reducing | 2.7E−58 |
| | | | | | hydrogenase, delta | |
| | | | | | subunit homolog FlpD | |
| MSM1462 | Msp_0639 | FdhB | 1.2E−119 | NONE | formate dehydrogenase, | 1.9E−135 |
| | | | | | beta subunit related | |
| | | | | | protein FlpB | |
| MSM1463 | Msp_0640 | FdhA | 4.1E−50 | NONE | formate dehydrogenase, | 2.0E−39 |
| | | | | | alpha subunit related | |
| | | | | | protein FlpC | |
| MSM1464 | NONE | | | MTH_1141 | conserved protein (FlpE) | 1.2E−18 |
| MSM1465 | Msp_0925 | predicted arabinose efflux | 1.3E−115 | MTH_195 | efflux pump antibiotic | 9.5E−95 |
| | | permease | | | resistance protein | |
| MSM1466 | NONE | | | NONE | | |
| MSM1467 | NONE | | | NONE | | |
| MSM1468 | Msp_0986 | PurA | 7.6E−136 | MTH_615 | adenylosuccinate | 9.4E−143 |
| | | | | | synthetase | |
| MSM1469 | Msp_1164 | predicted ABC-type | 2.4E−91 | MTH_924 | molybdate-binding | 5.9E−06 |
| | | nitrate/sulfonate/bicarbonate | | | periplasmic protein | |
| | | transport system, periplasmic | | | | |
| | | solute-binding protein | | | | |
| MSM1470 | NONE | | | NONE | | |
| MSM1471 | Msp_0919 | predicted acyl-CoA synthetase | 2.3E−237 | NONE | succinyl-CoA synthetase, | 2.5E−07 |
| | | | | | alpha subunit | |
| MSM1472 | NONE | | | MTH_752 | conserved protein | 3.7E−77 |
| MSM1473 | Msp_0575 | predicted metal-dependent | 2.9E−79 | MTH_751 | conserved protein | 9.4E−72 |
| | | hydrolase | | | | |
| MSM1474 | Msp_0579 | AroC | 7.2E−124 | MTH_748 | chorismate synthase | 4.7E−125 |
| MSM1475 | Msp_0497 | putative endonuclease III | 1.0E−14 | MTH_746 | endonuclease III related | 2.1E−51 |
| | | | | | protein | |
| MSM1476 | Msp_0416 | HemB | 6.2E−102 | MTH_744 | porphobilinogen | 3.6E−102 |
| | | | | | synthase | |
| MSM1477 | Msp_0428 | predicted ATP:dephospho-CoA | 1.7E−58 | MTH_743 | conserved protein | 5.9E−70 |
| | | triphosphoribosyl transferase | | | | |
| MSM1478 | Msp_0429 | PheS | 2.6E−165 | MTH_742 | phenylalanyl-tRNA | 5.5E−170 |
| | | | | | synthetase | |
| MSM1479 | NONE | | | MTH_212 | exodeoxyribonuclease | 2.4E−73 |
| MSM1480 | Msp_1260 | predicted hydrolase | 1.5E−59 | MTH_209 | conserved protein | 1.1E−77 |
| MSM1481 | Msp_1281 | conserved hypothetical protein | 6.5E−59 | MTH_208 | DNA-dependent DNA | 2.0E−69 |
| | | | | | polymerase family B | |
| | | | | | (PolB2) | |
| MSM1482 | NONE | | | NONE | | |
| MSM1483 | Msp_0195 | ABC-type multidrug transport | 2.0E−41 | MTH_1093 | ABC transporter (ATP- | 1.4E−54 |
| | | system, ATP-binding protein | | | binding | |
| MSM1484 | Msp_0196 | ABC-type multidrug transport | 8.1E−29 | MTH_1486 | conserved protein | 1.0E−19 |
| | | system, permease protein | | | | |
| MSM1485 | Msp_0440 | member of asn/thr-rich large protein | 3.3E−06 | NONE | | |
| | | family | | | | |
| MSM1486 | Msp_1280 | 30S ribosomal protein S8e | 6.6E−34 | MTH_207 | ribosomal protein S8 | 1.5E−41 |
| MSM1487 | NONE | | | MTH_199 | unknown | 9.6E−31 |
| MSM1488 | Msp_0977 | conserved hypothetical protein | 3.1E−27 | MTH_200 | cobalamin biosynthesis | 3.0E−50 |
| | | | | | protein M related protein | |
| MSM1489 | Msp_0474 | hypothetical protein | 1.2E−09 | MTH_1346 | unknown | 1.3E−177 |
| MSM1490 | Msp_0474 | hypothetical protein | 7.1E−06 | MTH_201 | unknown | 4.9E−11 |
| MSM1491 | Msp_0474 | hypothetical protein | 9.8E−08 | MTH_1346 | unknown | 1.3E−159 |
| MSM1492 | Msp_1279 | HypE1 | 1.0E−122 | MTH_205 | hydrogenase | 3.2E−126 |
| | | | | | expression/formation | |
| | | | | | protein HypE | |
| MSM1493 | Msp_1278 | conserved hypothetical membrane- | 1.3E−21 | MTH_204 | conserved protein | 4.3E−19 |
| | | spanning protein | | | | |
| MSM1494 | NONE | | | NONE | | |
| MSM1495 | Msp_1089 | predicted nuclease | 1.8E−40 | MTH_494 | thermonuclease | 8.5E−39 |
| | | | | | precursor | |
| MSM1496 | Msp_0024 | hypothetical protein | 4.5E−67 | NONE | | |
| MSM1497 | NONE | | | MTH_1785 | coenzyme PQQ | 6.4E−57 |
| | | | | | synthesis protein | |
| MSM1498 | Msp_1228 | predicted helicase | 2.1E−131 | NONE | ATP-dependent RNA | 3.8E−114 |
| | | | | | helicase, eIF-4A family | |
| MSM1499 | Msp_1188 | predicted transcriptional regulator | 8.1E−61 | MTH_163 | conserved protein | 2.5E−62 |
| MSM1500 | Msp_1189 | RecJ | 1.5E−114 | MTH_164 | single-stranded DNA | 1.1E−116 |
| | | | | | exonuclease RecJ | |
| | | | | | related protein | |
| MSM1501 | Msp_1190 | signal recognition particle, 19 kDa | 4.0E−20 | MTH_165 | signal recognition particle | 9.3E−17 |
| | | protein | | | 19 kDa protein | |
| MSM1502 | Msp_0223 | predicted UDP-galactopyranose | 3.6E−65 | MTH_344 | UDP-galactopyranose | 2.4E−80 |
| | | mutase | | | mutase | |
| MSM1503 | Msp_0215 | predicted glycosyltransferase | 4.0E−39 | MTH_884 | teichoic acid biosynthesis | 2.4E−06 |
| | | | | | related protein | |
| MSM1504 | Msp_1191 | HemD | 2.2E−49 | MTH_166 | uroporphyrinogen III | 1.1E−52 |
| | | | | | synthase | |
| MSM1505 | NONE | | | NONE | | |
| MSM1506 | NONE | | | NONE | | |
| MSM1507 | Msp_0215 | predicted glycosyltransferase | 5.6E−34 | MTH_884 | teichoic acid biosynthesis | 7.4E−10 |
| | | | | | related protein | |
| MSM1508 | NONE | | | NONE | | |
| MSM1509 | NONE | | | NONE | | |
| MSM1510 | NONE | | | NONE | | |
| MSM1511 | NONE | | | NONE | | |
| MSM1512 | Msp_0060 | putative lipooligosaccharide | 7.0E−62 | NONE | | |
| | | cholinephosphotransferase | | | | |
| MSM1513 | Msp_0662 | putative aspartate aminotransferase | 2.7E−37 | MTH_1601 | aspartate | 1.9E−41 |
| | | | | | aminotransferase | |
| MSM1514 | Msp_1333 | predicted dehydrogenase | 1.3E−06 | NONE | 3-chlorobenzoate-3,4- | 8.7E−09 |
| | | | | | dioxygenase | |
| | | | | | dyhydrogenase related | |
| | | | | | protein | |
| MSM1515 | Msp_0060 | putative lipooligosaccharide | 1.1E−24 | NONE | | |
| | | cholinephosphotransferase | | | | |
| MSM1516 | Msp_1326 | HisC | 1.7E−26 | MTH_1587 | histidinol-phosphate | 5.5E−22 |
| | | | | | aminotransferase | |
| MSM1517 | NONE | | | MTH_1495 | omithine cyclodeaminase | 1.2E−15 |
| MSM1518 | Msp_0017 | conserved hypothetical protein | 1.2E−11 | NONE | | |
| MSM1519 | NONE | | | NONE | | |
| MSM1520 | NONE | | | NONE | | |
| MSM1521 | NONE | | | NONE | | |
| MSM1522 | NONE | | | NONE | | |
| MSM1523 | NONE | | | NONE | | |
| MSM1524 | NONE | | | NONE | | |
| MSM1525 | NONE | | | NONE | | |
| MSM1526 | Msp_0772 | hypothetical membrane-spanning | 2.3E−15 | MTH_252 | conserved protein | 7.1E−19 |
| | | protein | | | | |
| MSM1527 | NONE | | | NONE | | |
| MSM1528 | Msp_0608 | predicted transcriptional regulator | 1.9E−04 | MTH_700 | conserved protein | 1.1E−04 |
| MSM1529 | NONE | | | NONE | | |
| MSM1530 | NONE | | | NONE | | |
| MSM1531 | Msp_0691 | predicted Na+-dependent | 1.3E−131 | NONE | | |
| | | transporter | | | | |
| MSM1532 | Msp_0691 | predicted Na+-dependent | 2.0E−137 | NONE | | |
| | | transporter | | | | |
| MSM1533 | Msp_1465 | member of asn/thr-rich large protein | 7.2E−12 | MTH_1074 | putative membrane | 3.7E−06 |
| | | family | | | protein | |
| MSM1534 | Msp_0590 | member of asn/thr-rich large protein | 2.0E−24 | MTH_1074 | putative membrane | 3.0E−123 |
| | | family | | | protein | |
| MSM1535 | Msp_1114 | predicted dTDP-D-glucose 4,6- | 1.3E−10 | NONE | dTDP-glucose 4,6- | 1.2E−06 |
| | | dehydratase | | | dehydratase | |
| MSM1536 | Msp_0290 | predicted pyridoxal phosphate- | 6.9E−71 | MTH_1188 | pleiotropic regulatory | 6.6E−71 |
| | | dependent enzyme | | | protein DegT | |
| MSM1537 | Msp_0310 | predicted | 4.2E−04 | NONE | | |
| | | GTP:adenosylcobinamide- | | | | |
| | | phosphate guanylyltransferase | | | | |
| MSM1538 | Msp_1202 | predicted acetyltransferase | 1.9E−08 | NONE | N-terminal | 3.5E−06 |
| | | | | | acetyltransferase | |
| | | | | | complex, subunit ARD1 | |
| MSM1539 | NONE | | | NONE | | |
| MSM1540 | NONE | | | MTH_368 | glycerol-3-phosphate | 6.5E−48 |
| | | | | | dehydrogenase (NAD) | |
| MSM1541 | NONE | | | NONE | | |
| MSM1542 | Msp_0310 | predicted | 4.6E−06 | MTH_1152 | conserved protein | 1.4E−04 |
| | | GTP:adenosylcobinamide- | | | | |
| | | phosphate guanylyltransferase | | | | |
| MSM1543 | NONE | | | NONE | | |
| MSM1544 | Msp_0060 | putative lipooligosaccharide | 3.9E−22 | NONE | | |
| | | cholinephosphotransferase | | | | |
| MSM1545 | Msp_0495 | predicted glycosyltransferase | 1.3E−31 | MTH_136 | dolichyl-phosphate | 1.4E−08 |
| | | | | | mannose synthase | |
| MSM1546 | NONE | | | NONE | | |
| MSM1547 | Msp_1195 | PurC | 3.9E−77 | MTH_170 | phosphoribosylaminoimidazolesuccino- | 6.8E−69 |
| | | | | | carboxamide synthase | |
| MSM1548 | Msp_1194 | predicted | 1.2E−25 | MTH_169 | conserved protein | 4.5E−24 |
| | | phosphoribosylformylglycinamidine | | | | |
| | | synthase | | | | |
| MSM1549 | Msp_1193 | PurQ | 2.4E−75 | MTH_168 | phosphoribosylformylglycinamidine | 6.8E−85 |
| | | | | | synthase I | |
| MSM1550 | Msp_1192 | CobA | 6.2E−86 | MTH_167 | S-adenosyl-L-methionine | 7.1E−90 |
| | | | | | uroporphyrinogen | |
| | | | | | methyltransferase | |
| MSM1551 | Msp_1196 | GlmS | 1.5E−201 | MTH_171 | glutamine-fructose-6- | 1.5E−208 |
| | | | | | phosphate transaminase | |
| MSM1552 | NONE | | | NONE | | |
| MSM1553 | NONE | | | NONE | | |
| MSM1554 | Msp_0141 | member of asn/thr-rich large protein | 1.1E−09 | NONE | | |
| | | family | | | | |
| MSM1555 | Msp_0076 | conserved hypothetical protein | 3.5E−60 | MTH_175 | conserved protein | 4.7E−77 |
| MSM1556 | Msp_1344 | conserved hypothetical membrane- | 6.5E−75 | NONE | | |
| | | spanning protein | | | | |
| MSM1557 | Msp_0520 | predicted queuine/archaeosine | 5.0E−219 | MTH_176 | tRNA-guanine | 1.2E−206 |
| | | tRNA-ribosyltransferase | | | transglycosylase | |
| MSM1558 | NONE | | | MTH_1329 | methyltransferase related | 3.1E−04 |
| | | | | | protein | |
| MSM1559 | Msp_0063 | predicted polysaccharide | 9.5E−74 | MTH_379 | O-antigen transporter | 1.7E−72 |
| | | biosynthesis protein | | | related protein | |
| MSM1560 | Msp_0448 | predicted polysaccharide | 1.3E−78 | MTH_379 | O-antigen transporter | 4.9E−75 |
| | | biosynthesis protein | | | related protein | |
| MSM1561 | Msp_0117 | predicted 3-hydroxy-3- | 3.6E−145 | MTH_792 | 3-hydroxy-3- | 3.4E−145 |
| | | methylglutaryl CoA synthase | | | methylglutaryl-CoA- | |
| | | | | | synthase | |
| MSM1562 | Msp_0116 | predicted thiolase | 2.1E−156 | MTH_793 | lipid-transfer protein | 3.5E−168 |
| | | | | | (sterol or nonspecific) | |
| MSM1563 | NONE | | | NONE | | |
| MSM1564 | Msp_0087 | CbiT | 4.6E−05 | NONE | | |
| MSM1565 | Msp_1226 | CobQ | 9.4E−154 | MTH_787 | cobyric acid synthase | 1.1E−162 |
| MSM1566 | Msp_0233 | conserved hypothetical protein | 2.3E−22 | NONE | | |
| MSM1567 | Msp_0762 | member of asn/thr-rich large protein | 7.2E−35 | MTH_1485 | serine/threonine protein | 5.1E−13 |
| | | family | | | kinase related protein | |
| MSM1568 | NONE | | | NONE | | |
| MSM1569 | Msp_1227 | predicted ATP-dependent protease | 2.4E−226 | MTH_785 | ATP-dependent protease | 9.0E−241 |
| | | | | | LA | |
| MSM1570 | Msp_0557 | hypothetical protein | 1.1E−127 | MTH_530 | UDP-N-acetylmuramyl | 2.6E−25 |
| | | | | | tripeptide synthetase | |
| | | | | | related protein | |
| MSM1571 | NONE | | | NONE | | |
| MSM1572 | Msp_0683 | hypothetical protein | 4.9E−61 | NONE | | |
| MSM1573 | NONE | | | NONE | | |
| MSM1574 | Msp_0797 | predicted nitroreductase | 6.3E−10 | MTH_120 | NADPH-oxidoreductase | 4.2E−11 |
| MSM1575 | Msp_1055 | hypothetical membrane-spanning | 7.8E−04 | MTH_521 | unknown | 8.2E−05 |
| | | protein | | | | |
| MSM1576 | NONE | | | NONE | | |
| MSM1577 | Msp_1229 | ribose-phosphate | 1.2E−84 | MTH_784 | ribose-phosphate | 1.0E−88 |
| | | pyrophosphokinase | | | pyrophosphokinase | |
| MSM1578 | NONE | | | NONE | | |
| MSM1579 | Msp_0573 | UvrB | 1.2E−247 | MTH_442 | excinuclease ABC | 1.2E−261 |
| | | | | | subunit B | |
| MSM1580 | NONE | | | NONE | | |
| MSM1581 | Msp_0574 | UvrA | 0.0E+00 | MTH_443 | excinuclease ABC | 0.0E+00 |
| | | | | | subunit A | |
| MSM1582 | Msp_0603 | conserved hypothetical membrane- | 5.6E−85 | MTH_465 | unknown | 4.8E−84 |
| | | spanning protein | | | | |
| MSM1583 | Msp_1178 | predicted helicase | 7.4E−193 | MTH_656 | ATP-dependent RNA | 2.1E−232 |
| | | | | | helicase related protein | |
| MSM1584 | Msp_1119 | conserved hypothetical protein | 1.0E−37 | MTH_641 | conserved protein | 2.9E−29 |
| MSM1585 | Msp_0983 | member of asn/thr-rich large protein | 5.5E−38 | MTH_911 | probable surface protein | 9.9E−06 |
| | | family | | | | |
| MSM1586 | Msp_0713 | member of asn/thr-rich large protein | 1.8E−52 | MTH_911 | probable surface protein | 3.7E−14 |
| | | family | | | | |
| MSM1587 | Msp_0590 | member of asn/thr-rich large protein | 6.0E−44 | MTH_716 | cell surface glycoprotein | 1.2E−06 |
| | | family | | | (s-layer protein) | |
| MSM1588 | NONE | | | NONE | | |
| MSM1589 | NONE | | | NONE | | |
| MSM1590 | Msp_0619 | member of asn/thr-rich large protein | 2.5E−48 | MTH_716 | cell surface glycoprotein | 1.3E−07 |
| | | family | | | (s-layer protein) | |
| MSM1591 | Msp_1118 | conserved hypothetical protein | 1.0E−37 | MTH_639 | conserved protein | 5.6E−42 |
| MSM1592 | Msp_0205 | predicted ABC-type | 9.8E−72 | MTH_1370 | ABC transporter (ATP- | 1.5E−20 |
| | | polysaccharide/polyol phosphate | | | binding protein) | |
| | | export system, ATP-binding protein | | | | |
| MSM1593 | Msp_0204 | predicted ABC-type | 1.3E−53 | MTH_1092 | putative membrane | 5.7E−11 |
| | | polysaccharide/polyol phosphate | | | protein | |
| | | export system, permease protein | | | | |
| MSM1594 | Msp_0442 | predicted glycosyltransferase | 4.4E−60 | MTH_884 | teichoic acid biosynthesis | 1.5E−07 |
| | | | | | related protein | |
| MSM1595 | Msp_0929 | predicted helicase | 6.7E−04 | NONE | | |
| MSM1596 | Msp_0017 | conserved hypothetical protein | 1.7E−28 | NONE | | |
| MSM1597 | NONE | | | NONE | | |
| MSM1598 | NONE | | | NONE | | |
| MSM1599 | NONE | | | NONE | | |
| MSM1600 | NONE | | | NONE | | |
| MSM1601 | Msp_0692 | hypothetical membrane-spanning | 1.3E−07 | NONE | | |
| | | protein | | | | |
| MSM1602 | Msp_0220 | predicted glycosyltransferase | 6.9E−20 | MTH_361 | teichoic acid biosynthesis | 1.7E−04 |
| | | | | | protein RodC related | |
| | | | | | protein | |
| MSM1603 | NONE | | | MTH_637 | conserved protein | 1.1E−20 |
| MSM1604 | Msp_1101 | predicted UDP-glucose | 1.2E−103 | MTH_634 | UTP--glucose-1- | 7.6E−109 |
| | | pyrophosphorylase | | | phosphate | |
| | | | | | uridylyltransferase | |
| MSM1605 | NONE | | | NONE | | |
| MSM1606 | Msp_0612 | predicted arylsulfatase regulatory | 4.8E−102 | MTH_114 | arylsulfatase regulatory | 1.9E−64 |
| | | protein | | | protein | |
| MSM1607 | Msp_1060 | hypothetical protein | 2.4E−13 | MTH_121 | unknown | 1.2E−05 |
| MSM1608 | Msp_1350 | putative oxidoreductase | 5.9E−97 | MTH_907 | conserved protein | 8.1E−50 |
| MSM1609 | NONE | | | MTH_924 | molybdate-binding | 6.6E−23 |
| | | | | | periplasmic protein | |
| MSM1610 | Msp_0342 | PstC | 1.1E−15 | MTH_921 | anion transport system | 6.4E−25 |
| | | | | | permease protein | |
| MSM1611 | Msp_1000 | predicted ABC-type | 1.7E−28 | MTH_920 | anion permease | 2.4E−34 |
| | | nitrate/sulfonate/bicarbonate | | | | |
| | | transport system, ATB-binding | | | | |
| | | protein | | | | |
| MSM1612 | Msp_0210 | predicted UDP-glucose 6- | 6.3E−93 | MTH_836 | UDP-N-acetyl-D- | 5.4E−24 |
| | | dehydrogenase | | | mannosaminuronic acid | |
| | | | | | dehydrogenase | |
| MSM1613 | NONE | | | NONE | | |
| MSM1614 | Msp_0394 | predicted transcriptional regulator | 1.3E−74 | MTH_126 | inosine-5′- | 2.1E−97 |
| | | | | | monophosphate | |
| | | | | | dehydrogenase related | |
| | | | | | protein VII | |
| MSM1615 | Msp_0395 | putative deoxyhypusine synthase | 7.4E−106 | MTH_127 | deoxyhypusine synthase | 4.6E−95 |
| MSM1616 | Msp_0396 | hypothetical membrane-spanning | 4.0E−27 | MTH_128 | unknown | 6.2E−27 |
| | | protein | | | | |
| MSM1617 | Msp_0397 | PyrF | 1.9E−66 | MTH_129 | orotidine 5′ | 4.3E−67 |
| | | | | | monophosphate | |
| | | | | | decarboxylase | |
| MSM1618 | Msp_0398 | CbiM1 | 6.0E−72 | MTH_130 | cobalamin biosynthesis | 9.5E−79 |
| | | | | | protein M | |
| MSM1619 | Msp_0399 | CbiN | 3.0E−31 | MTH_131 | cobalt transport protein N | 7.2E−26 |
| MSM1620 | Msp_0400 | CbiQ1 | 3.0E−38 | MTH_132 | cobalt transport protein Q | 3.4E−42 |
| MSM1621 | Msp_0401 | CbiO1 | 6.0E−88 | MTH_133 | cobalt transport ATP- | 9.3E−88 |
| | | | | | binding protein O | |
| MSM1622 | Msp_1239 | RibC | 6.9E−55 | MTH_134 | riboflavin synthase | 2.3E−61 |
| MSM1623 | Msp_0541 | predicted glycosyltransferase | 2.1E−46 | MTH_136 | dolichyl-phosphate | 6.1E−52 |
| | | | | | mannose synthase | |
| MSM1624 | Msp_0542 | hypothetical membrane-spanning | 9.4E−19 | MTH_137 | unknown | 1.2E−18 |
| | | protein | | | | |
| MSM1625 | Msp_1044 | TfrB | 3.2E−34 | MTH_1850 | fumarate reductase | 7.6E−33 |
| MSM1626 | Msp_1044 | TfrB | 3.0E−07 | MTH_140 | conserved protein | 4.8E−107 |
| MSM1627 | Msp_0989 | predicted glycosyltransferase | 9.5E−11 | MTH_377 | dolichyl-phosphate | 2.0E−11 |
| | | | | | mannose synthase | |
| | | | | | related protein | |
| MSM1628 | Msp_0430 | conserved hypothetical protein | 1.9E−75 | MTH_141 | conserved protein | 7.0E−99 |
| MSM1629 | Msp_0431 | GuaB | 2.1E−163 | MTH_142 | inosine-5′- | 1.5E−174 |
| | | | | | monophosphate | |
| | | | | | dehydrogenase | |
| MSM1630 | Msp_1253 | 50S ribosomal protein L37Ae | 6.0E−33 | MTH_681 | ribosomal protein L37a | 1.1E−36 |
| MSM1631 | NONE | | | NONE | | |
| MSM1632 | Msp_1254 | partially conserved hypothetical | 1.0E−21 | MTH_680 | conserved protein | 1.4E−15 |
| | | protein | | | | |
| MSM1633 | Msp_1255 | conserved hypothetical protein | 1.0E−12 | MTH_679 | unknown | 5.3E−14 |
| MSM1634 | Msp_1256 | partially conserved hypothetical | 2.5E−27 | MTH_678 | conserved protein | 2.1E−35 |
| | | protein | | | | |
| MSM1635 | NONE | | | MTH_677 | unknown | 1.7E−10 |
| MSM1636 | Msp_1257 | conserved hypothetical protein | 2.6E−39 | MTH_669 | phosphoribosylformimino- | 1.3E−58 |
| | | | | | 5-aminoimidazole | |
| | | | | | carboxamide ribotide | |
| | | | | | isomerase related protein | |
| MSM1637 | Msp_0173 | hypothetical membrane-spanning | 9.9E−08 | NONE | | |
| | | protein | | | | |
| MSM1638 | Msp_1259 | hypothetical membrane-spanning | 1.6E−09 | MTH_667 | unknown | 3.0E−11 |
| | | protein | | | | |
| MSM1639 | Msp_0519 | predicted Co/Zn/Cd cation | 4.1E−16 | MTH_1893 | cation efflux system | 3.7E−17 |
| | | transporter | | | protein (zinc/cadmium) | |
| MSM1640 | Msp_0482 | hypothetical membrane-spanning | 1.8E−38 | NONE | | |
| | | protein | | | | |
| MSM1641 | NONE | | | NONE | | |
| MSM1642 | NONE | | | NONE | | |
| MSM1643 | NONE | | | NONE | | |
| MSM1644 | NONE | | | NONE | | |
| MSM1645 | NONE | | | NONE | | |
| MSM1646 | NONE | | | NONE | | |
| MSM1647 | NONE | | | NONE | | |
| MSM1648 | NONE | | | NONE | | |
| MSM1649 | NONE | | | NONE | | |
| MSM1650 | Msp_0260 | hypothetical protein | 7.9E−04 | NONE | | |
| MSM1651 | NONE | | | NONE | | |
| MSM1652 | NONE | | | NONE | | |
| MSM1653 | NONE | | | NONE | | |
| MSM1654 | NONE | | | NONE | | |
| MSM1655 | Msp_1059 | hypothetical protein | 1.3E−05 | NONE | | |
| MSM1656 | NONE | | | NONE | | |
| MSM1657 | Msp_0793 | hypothetical protein | 4.9E−06 | NONE | | |
| MSM1658 | NONE | | | NONE | | |
| MSM1659 | NONE | | | NONE | | |
| MSM1660 | NONE | | | NONE | | |
| MSM1661 | NONE | | | NONE | | |
| MSM1662 | NONE | | | NONE | | |
| MSM1663 | NONE | | | NONE | | |
| MSM1664 | NONE | | | NONE | | |
| MSM1665 | NONE | | | NONE | | |
| MSM1666 | Msp_0946 | conserved hypothetical protein | 1.2E−05 | NONE | | |
| MSM1667 | NONE | | | NONE | | |
| MSM1668 | NONE | | | NONE | | |
| MSM1669 | NONE | | | NONE | | |
| MSM1670 | Msp_0113 | conserved hypothetical protein | 1.8E−04 | NONE | | |
| MSM1671 | NONE | | | NONE | | |
| MSM1672 | NONE | | | NONE | | |
| MSM1673 | Msp_0474 | hypothetical protein | 4.6E−04 | NONE | | |
| MSM1674 | Msp_0822 | hypothetical protein | 2.5E−04 | NONE | | |
| MSM1675 | NONE | | | NONE | | |
| MSM1676 | NONE | | | NONE | | |
| MSM1677 | NONE | | | NONE | | |
| MSM1678 | NONE | | | NONE | | |
| MSM1679 | NONE | | | NONE | | |
| MSM1680 | NONE | | | NONE | | |
| MSM1681 | NONE | | | NONE | | |
| MSM1682 | NONE | | | NONE | | |
| MSM1683 | NONE | | | NONE | | |
| MSM1684 | Msp_0912 | member of asn/thr-rich large protein | 2.1E−06 | MTH_412 | conserved protein | 4.7E−04 |
| | | family | | | | |
| MSM1685 | NONE | | | NONE | | |
| MSM1686 | NONE | | | NONE | | |
| MSM1687 | Msp_0658 | hypothetical membrane-spanning | 8.1E−07 | MTH_1459 | unknown | 3.6E−07 |
| | | protein | | | | |
| MSM1688 | NONE | | | NONE | | |
| MSM1689 | NONE | | | NONE | | |
| MSM1690 | NONE | | | NONE | | |
| MSM1691 | Msp_1039 | partially conserved hypothetical | 1.5E−07 | MTH_357 | conserved protein | 5.3E−08 |
| | | membrane-spanning protein | | | | |
| MSM1692 | NONE | | | NONE | | |
| MSM1693 | Msp_1258 | predicted ribokinase | 6.9E−39 | MTH_668 | unknown | 1.8E−20 |
| MSM1694 | Msp_0929 | predicted helicase | 3.6E−193 | MTH_487 | DNA helicase related | 4.9E−304 |
| | | | | | protein | |
| MSM1695 | Msp_0572 | UvrC | 6.3E−164 | MTH_441 | excinuclease ABC | 5.6E−161 |
| | | | | | subunit C | |
| MSM1696 | Msp_1548 | hypothetical protein | 1.7E−08 | NONE | | |
| MSM1697 | NONE | | | NONE | | |
| MSM1698 | Msp_0439 | methyl-coenzyme M reductase, | 2.7E−147 | NONE | methyl coenzyme M | 5.4E−179 |
| | | component A2-like protein | | | reductase system, | |
| | | | | | component A2 homolog | |
| MSM1699 | Msp_0438 | predicted universal stress protein | 2.1E−14 | MTH_153 | conserved protein | 5.4E−21 |
| MSM1700 | Msp_1061 | hypothetical protein | 7.3E−12 | MTH_278 | ferredoxin | 1.4E−20 |
| MSM1701 | Msp_1062 | predicted dehydrogenase | 4.0E−130 | MTH_277 | bacteriochlorophyll | 8.8E−147 |
| | | | | | synthase 43 kDa subunit | |
| MSM1702 | Msp_1088 | ExoB | 7.9E−102 | MTH_631 | UDP-glucose 4- | 3.5E−97 |
| | | | | | epimerase | |
| MSM1703 | NONE | | | MTH_647 | unknown | 5.0E−25 |
| MSM1704 | Msp_1122 | PurF | 1.4E−143 | MTH_646 | amidophosphoribosyltransferase | 1.2E−156 |
| MSM1705 | Msp_1121 | predicted peptidase | 2.4E−100 | MTH_645 | collagenase | 3.7E−100 |
| MSM1706 | Msp_1513 | hypothetical membrane-spanning | 2.9E−24 | NONE | | |
| | | protein | | | | |
| MSM1707 | Msp_1120 | NifH | 2.6E−96 | MTH_643 | nitrogenase NifH subunit | 5.5E−99 |
| MSM1708 | NONE | | | NONE | | |
| MSM1709 | Msp_0440 | member of asn/thr-rich large protein | 1.3E−35 | MTH_716 | cell surface glycoprotein | 2.4E−04 |
| | | family | | | (s-layer protein) | |
| MSM1710 | Msp_1277 | SerS | 1.9E−187 | MTH_1455 | threonyl-tRNA | 5.3E−06 |
| | | | | | synthetase | |
| MSM1711 | Msp_0725 | hypothetical protein | 1.0E−08 | NONE | | |
| MSM1712 | Msp_0852 | predicted ferritin | 8.4E−50 | MTH_158 | ferritin like protein (RsgA) | 2.3E−59 |
| MSM1713 | Msp_1008 | predicted regulatory protein | 5.4E−32 | MTH_162 | unknown | 1.5E−41 |
| MSM1714 | Msp_1040 | coenzyme F390 synthetase II | 6.3E−164 | MTH_161 | coenzyme F390 | 3.7E−164 |
| | | | | | synthetase III | |
| MSM1715 | Msp_1110 | CobN | 1.7E−68 | MTH_714 | magnesium chelatase | 0.0E+00 |
| | | | | | subunit | |
| MSM1716 | Msp_0590 | member of asn/thr-rich large protein | 2.5E−16 | MTH_717 | unknown | 3.9E−25 |
| | | family | | | | |
| MSM1717 | Msp_1105 | predicted transporter | 1.9E−52 | MTH_672 | unknown | 2.3E−52 |
| MSM1718 | Msp_1106 | conserved hypothetical membrane- | 2.0E−50 | MTH_671 | unknown | 3.7E−61 |
| | | spanning protein | | | | |
| MSM1719 | Msp_1107 | conserved hypothetical membrane- | 4.1E−25 | MTH_670 | unknown | 1.2E−32 |
| | | spanning protein | | | | |
| MSM1720 | Msp_1533 | RpoM1 | 7.3E−28 | MTH_1314 | transcription elongation | 8.6E−30 |
| | | | | | factor TFIIS | |
| MSM1721 | NONE | | | NONE | | |
| MSM1722 | Msp_0965 | predicted nitroreductase | 6.9E−16 | MTH_120 | NADPH-oxidoreductase | 7.3E−33 |
| MSM1723 | Msp_1238 | N(5),N(10)- | 6.7E−105 | NONE | N5,N10-methenyl- | 2.1E−138 |
| | | methenyltetrahydromethanopterin | | | tetrahydromethanopterin | |
| | | cyclohydrolase | | | cyclohydrolase | |
| MSM1724 | Msp_0961 | hypothetical membrane-spanning | 3.1E−36 | MTH_1192 | conserved protein | 9.2E−25 |
| | | protein | | | | |
| MSM1725 | Msp_0961 | hypothetical membrane-spanning | 5.7E−28 | MTH_1192 | conserved protein | 1.6E−30 |
| | | protein | | | | |
| MSM1726 | Msp_0879 | hypothetical membrane-spanning | 9.0E−30 | MTH_1192 | conserved protein | 1.3E−25 |
| | | protein | | | | |
| MSM1727 | Msp_0844 | predicted multimeric flavodoxin | 1.2E−18 | MTH_135 | conserved protein | 1.9E−18 |
| MSM1728 | NONE | | | NONE | | |
| MSM1729 | Msp_0587 | hypothetical membrane-spanning | 5.0E−29 | MTH_520 | unknown | 3.9E−10 |
| | | protein | | | | |
| MSM1730 | Msp_0607 | hypothetical membrane-spanning | 6.5E−20 | MTH_1192 | conserved protein | 1.2E−26 |
| | | protein | | | | |
| MSM1731 | Msp_0714 | predicted short chain | 1.7E−115 | NONE | | |
| | | dehydrogenase | | | | |
| MSM1732 | Msp_1548 | hypothetical protein | 8.2E−07 | NONE | | |
| MSM1733 | Msp_0789 | rubrerythrin | 1.6E−39 | MTH_756 | rubrerythrin | 3.3E−43 |
| MSM1734 | Msp_1237 | ThyA | 8.9E−28 | MTH_774 | thymidylate synthase | 7.2E−26 |
| MSM1735 | Msp_0777 | member of asn/thr-rich large protein | 7.4E−116 | MTH_716 | cell surface glycoprotein | 1.4E−06 |
| | | family | | | (s-layer protein) | |
| MSM1736 | NONE | | | NONE | | |
| MSM1737 | NONE | | | NONE | | |
| MSM1738 | Msp_0154 | member of asn/thr-rich large protein | 2.3E−06 | NONE | | |
| | | family | | | | |
| MSM1739 | Msp_0987 | hypothetical membrane-spanning | 2.7E−07 | MTH_521 | unknown | 1.4E−05 |
| | | protein | | | | |
| MSM1740 | Msp_1323 | conserved hypothetical protein | 1.1E−16 | MTH_83 | O-linked GlcNAc | 4.7E−38 |
| | | | | | transferase | |
| MSM1741 | Msp_0113 | conserved hypothetical protein | 5.0E−05 | NONE | | |
| MSM1742 | Msp_0482 | hypothetical membrane-spanning | 2.7E−76 | NONE | | |
| | | protein | | | | |
| MSM1743 | Msp_0113 | conserved hypothetical protein | 4.1E−06 | NONE | | |
| MSM1744 | NONE | | | NONE | | |
| MSM1745 | Msp_0344 | predicted phosphate uptake | 2.0E−04 | NONE | | |
| | | regulator | | | | |
| MSM1746 | NONE | | | NONE | | |
| MSM1747 | Msp_0911 | member of asn/thr-rich large protein | 8.1E−06 | NONE | | |
| | | family | | | | |
| MSM1748 | NONE | | | NONE | | |
| MSM1749 | NONE | | | NONE | | |
| MSM1750 | NONE | | | NONE | | |
| MSM1751 | Msp_0113 | conserved hypothetical protein | 6.3E−15 | NONE | | |
| MSM1752 | Msp_0702 | conserved hypothetical protein | 1.2E−59 | MTH_1210 | mrr restriction system | 3.4E−42 |
| | | | | | related protein | |
| MSM1753 | Msp_0465 | conserved hypothetical membrane- | 6.7E−04 | NONE | | |
| | | spanning protein | | | | |
| MSM1754 | Msp_1328 | putative ATP-dependent protease | 3.6E−06 | NONE | | |
| | | La | | | | |
| MSM1755 | Msp_0219 | conserved hypothetical protein | 6.7E−04 | NONE | | |
| MSM1756 | Msp_0976 | hypothetical protein | 2.8E−05 | NONE | | |
| MSM1757 | NONE | | | NONE | | |
| MSM1758 | NONE | | | NONE | | |
| MSM1759 | NONE | | | NONE | | |
| MSM1760 | NONE | | | NONE | | |
| MSM1761 | Msp_0113 | conserved hypothetical protein | 7.6E−07 | MTH_540 | intracellular protein | 2.7E−05 |
| | | | | | transport protein | |
| MSM1762 | NONE | | | NONE | | |
| MSM1763 | Msp_1533 | RpoM1 | 4.6E−10 | MTH_1314 | transcription elongation | 3.1E−09 |
| | | | | | factor TFIIS | |
| MSM1764 | Msp_0226 | hypothetical protein | 8.9E−04 | NONE | | |
| MSM1765 | NONE | | | NONE | | |
| MSM1766 | Msp_1323 | conserved hypothetical protein | 4.8E−15 | MTH_83 | O-linked GlcNAc | 3.4E−35 |
| | | | | | transferase | |
| MSM1767 | Msp_1548 | hypothetical protein | 1.3E−04 | NONE | | |
| MSM1768 | NONE | | | NONE | | |
| MSM1769 | Msp_0724 | hypothetical membrane-spanning | 2.1E−08 | MTH_1277 | unknown | 8.9E−05 |
| | | protein | | | | |
| MSM1770 | Msp_0934 | conserved hypothetical membrane- | 1.4E−17 | MTH_518 | conserved protein | 3.4E−19 |
| | | spanning protein | | | | |
| MSM1771 | Msp_0128 | predicted helicase | 5.0E−19 | MTH_511 | DNA helicase II | 1.1E−26 |
| MSM1772 | Msp_0725 | hypothetical protein | 4.0E−11 | MTH_470 | conserved protein | 1.2E−04 |
| MSM1773 | Msp_1548 | hypothetical protein | 4.3E−07 | MTH_521 | unknown | 7.7E−05 |
| MSM1774 | NONE | | | NONE | | |
| MSM1775 | NONE | | | NONE | | |
| MSM1776 | NONE | | | NONE | | |
| MSM1777 | Msp_0799 | predicted transcriptional regulator | 3.3E−05 | MTH_671 | unknown | 2.6E−04 |
| MSM1778 | Msp_0726 | hypothetical protein | 2.7E−69 | NONE | | |
| MSM1779 | Msp_0725 | hypothetical protein | 2.6E−119 | NONE | | |
| MSM1780 | Msp_1055 | hypothetical membrane-spanning | 1.1E−10 | MTH_1277 | unknown | 2.7E−06 |
| | | protein | | | | |
| MSM1781 | Msp_0725 | hypothetical protein | 2.4E−13 | MTH_470 | conserved protein | 1.4E−05 |
| MSM1782 | NONE | | | NONE | | |
| MSM1783 | NONE | | | NONE | | |
| MSM1784 | NONE | | | NONE | | |
| MSM1785 | NONE | | | NONE | | |
| MSM1786 | Msp_1323 | conserved hypothetical protein | 4.1E−07 | MTH_83 | O-linked GlcNAc | 6.9E−12 |
| | | | | | transferase | |
| MSM1787 | Msp_1323 | conserved hypothetical protein | 5.6E−09 | MTH_72 | O-linked GlcNAc | 3.6E−16 |
| | | | | | transferase | |
| MSM1788 | Msp_1323 | conserved hypothetical protein | 7.3E−11 | MTH_83 | O-linked GlcNAc | 2.0E−20 |
| | | | | | transferase | |
| MSM1789 | Msp_0757 | predicted ATPase | 2.5E−08 | NONE | | |
| MSM1790 | Msp_0757 | predicted ATPase | 4.9E−08 | NONE | | |
| MSM1791 | NONE | | | MTH_512 | unknown | 1.1E−25 |
| MSM1792 | Msp_0764 | predicted nicotinate | 1.7E−193 | NONE | | |
| | | phosphoribosyltransferase | | | | |
| MSM1793 | NONE | | | NONE | | |
| MSM1794 | Msp_1103 | member of asn/thr-rich large protein | 1.5E−04 | MTH_512 | unknown | 1.2E−24 |
| | | family | | | | |
| MSM1795 | Msp_0757 | predicted ATPase | 1.7E−99 | NONE | | |

TABLE 9
Cluster of Orthologous Groups (COG) represented in the M. smithii proteome
A. Summary

| Number of M. smithii | | |
|---|---|---|
| genes in COG | Code | Functional Category |
| 136 | J | Translation |
| 60 | K | Transcription |
| 78 | L | Replication, Recombination and Repair |
| 3 | B | Chromatin Structure and Dynamics |
| 6 | D | Cell Cycle Control |
| 26 | V | Defense Mechanisms |
| 8 | T | Signal Transduction Mechanisms |
| 59 | M | Cell Wall/Membrane Biogenesis |
| 3 | N | Cell Motility |
| 1 | Z | Cytoskeleton |
| 17 | U | Intracellular Trafficking and Secretion |
| 41 | O | Post-translational Modification, Protein Turnover, |
| | | Chaperones |
| 121 | C | Energy Production and Conversion |
| 30 | G | Carbohydrate Transport and Metabolism |
| 82 | E | Amino Acid Transport and Metabolism |
| 42 | F | Nucleic Acid Transport and Metabolism |
| 92 | H | Coenzyme Transport and Metabolism |
| 18 | I | Lipid Transport and Metabolism |
| 57 | P | Inorganic Ion Transport and Metabolism |
| 1 | Q | Secondary Metabolites Biosynthesis, Transport and |
| | | Catabolism |
| 201 | R | General Function Prediction Only |
| 171 | S | Function Unknown |
| 491 | — | Not in COGs |

B. M. smithii genes in each COG

| | | |
|---|---|---|
| # in COG COG | Description | M. smithii gene(s) |

Translation (J)

| | | | |
|---|---|---|---|
| 1 | COG0008 | Glutamyl- and glutaminyl-tRNA synthetases | MSM1452 |
| 1 | COG0009 | Putative translation factor (SUA5) | MSM0612 |
| 1 | COG0012 | Predicted GTPase, probable translation factor | MSM1164 |
| 1 | COG0013 | Alanyl-tRNA synthetase | MSM0619 |
| 1 | COG0016 | Phenylalanyl-tRNA synthetase alpha subunit | MSM1478 |
| 1 | COG0017 | Aspartyl/asparaginyl-tRNA synthetases | MSM1236 |
| 1 | COG0018 | Arginyl-tRNA synthetase | MSM1231 |
| 1 | COG0023 | Translation initiation factor 1 (eIF-1/SUI1) and related proteins | MSM0754 |
| 1 | COG0024 | Methionine aminopeptidase | MSM1120 |
| 1 | COG0030 | Dimethyladenosine transferase (rRNA methylation) | MSM1374 |
| 1 | COG0042 | tRNA-dihydrouridine synthase | MSM0972 |
| 1 | COG0048 | Ribosomal protein S12 | MSM0901 |
| 1 | COG0049 | Ribosomal protein S7 | MSM0900 |
| 1 | COG0051 | Ribosomal protein S10 | MSM0897 |
| 1 | COG0060 | Isoleucyl-tRNA synthetase | MSM1341 |
| 1 | COG0064 | Asp-tRNAAsn/Glu-tRNAGln amidotransferase B subunit (PET112 | MSM1101 |
| | | homolog) | |
| 1 | COG0072 | Phenylalanyl-tRNA synthetase beta subunit | MSM0277 |
| 1 | COG0080 | Ribosomal protein L11 | MSM0623 |
| 1 | COG0081 | Ribosomal protein L1 | MSM0622 |
| 1 | COG0087 | Ribosomal protein L3 | MSM0762 |
| 1 | COG0088 | Ribosomal protein L4 | MSM0761 |
| 1 | COG0089 | Ribosomal protein L23 | MSM0760 |
| 1 | COG0090 | Ribosomal protein L2 | MSM0759 |
| 1 | COG0091 | Ribosomal protein L22 | MSM0757 |
| 1 | COG0092 | Ribosomal protein S3 | MSM0756 |
| 1 | COG0093 | Ribosomal protein L14 | MSM0751 |
| 1 | COG0094 | Ribosomal protein L5 | MSM0748 |
| 1 | COG0096 | Ribosomal protein S8 | MSM0746 |
| 1 | COG0097 | Ribosomal protein L6P/L9E | MSM0745 |
| 1 | COG0098 | Ribosomal protein S5 | MSM0741 |
| 1 | COG0099 | Ribosomal protein S13 | MSM1425 |
| 1 | COG0100 | Ribosomal protein S11 | MSM1427 |
| 1 | COG0101 | Pseudouridylate synthase | MSM0855 |
| 1 | COG0102 | Ribosomal protein L13 | MSM1430 |
| 1 | COG0103 | Ribosomal protein S9 | MSM1431 |
| 1 | COG0124 | Histidyl-tRNA synthetase | MSM1181 |
| 1 | COG0130 | Pseudouridine synthase | MSM0732 |
| 1 | COG0143 | Methionyl-tRNA synthetase | MSM0071 |
| 1 | COG0154 | Asp-tRNAAsn/Glu-tRNAGln amidotransferase A subunit and | MSM1253 |
| | | related amidases | |
| 1 | COG0162 | Tyrosyl-tRNA synthetase | MSM0513 |
| 1 | COG0172 | Seryl-tRNA synthetase | MSM1710 |
| 1 | COG0180 | Tryptophanyl-tRNA synthetase | MSM0216 |
| 1 | COG0182 | Predicted translation initiation factor 2B subunit, eIF-2B | MSM0804 |
| | | alpha/beta/delta family | |
| 1 | COG0184 | Ribosomal protein S15P/S13E | MSM1194 |
| 1 | COG0185 | Ribosomal protein S19 | MSM0758 |
| 1 | COG0186 | Ribosomal protein S17 | MSM0752 |
| 1 | COG0197 | Ribosomal protein L16/L10E | MSM0989 |
| 1 | COG0198 | Ribosomal protein L24 | MSM0750 |
| 1 | COG0199 | Ribosomal protein S14 | MSM0747 |
| 1 | COG0200 | Ribosomal protein L15 | MSM0739 |
| 1 | COG0215 | Cysteinyl-tRNA synthetase | MSM0268 |
| 1 | COG0231 | Translation elongation factor P (EF-P)/translation initiation factor | MSM0877 |
| | | 5A (eIF-5A) | |
| 1 | COG0244 | Ribosomal protein L10 | MSM0621 |
| 1 | COG0255 | Ribosomal protein L29 | MSM0755 |
| 1 | COG0256 | Ribosomal protein L18 | MSM0742 |
| 1 | COG0293 | 23S rRNA methylase | MSM0508 |
| 1 | COG0343 | Queuine/archaeosine tRNA-ribosyltransferase | MSM1557 |
| 1 | COG0423 | Glycyl-tRNA synthetase (class II) | MSM0403 |
| 1 | COG0441 | Threonyl-tRNA synthetase | MSM1214 |
| 1 | COG0442 | Prolyl-tRNA synthetase | MSM0287 |
| 1 | COG0480 | Translation elongation factors (GTPases) | MSM0899 |
| 1 | COG0495 | Leucyl-tRNA synthetase | MSM1172 |
| 1 | COG0522 | Ribosomal protein S4 and related proteins | MSM1426 |
| 1 | COG0525 | Valyl-tRNA synthetase | MSM0275 |
| 1 | COG0532 | Translation initiation factor 2 (IF-2; GTPase) | MSM0202 |
| 1 | COG0565 | rRNA methylase | MSM0394 |
| 1 | COG0621 | 2-methylthioadenine synthetase | MSM0845 |
| 1 | COG0689 | RNase PH | MSM0242 |
| 1 | COG1093 | Translation initiation factor 2, alpha subunit (eIF-2alpha) | MSM1133 |
| 1 | COG1096 | Predicted RNA-binding protein (consists of S1 domain and a Zn- | MSM1357 |
| | | ribbon domain) | |
| 1 | COG1097 | RNA-binding protein Rrp4 and related proteins (contain S1 domain | MSM0243 |
| | | and KH domain) | |
| 1 | COG1258 | Predicted pseudouridylate synthase | MSM1361 |
| 1 | COG1325 | Predicted exosome subunit | MSM0297 |
| 1 | COG1358 | Ribosomal protein HS6-type (S12/L30/L7a) | MSM0206 |
| 1 | COG1369 | RNase P/RNase MRP subunit POP5 | MSM0246 |
| 1 | COG1383 | Ribosomal protein S17E | MSM0833 |
| 1 | COG1384 | Lysyl-tRNA synthetase (class I) | MSM1387 |
| 1 | COG1471 | Ribosomal protein S4E | MSM0749 |
| 1 | COG1491 | Predicted RNA-binding protein | MSM1375 |
| 1 | COG1498 | Protein implicated in ribosomal biogenesis, Nop56p homolog | MSM1046 |
| 1 | COG1500 | Predicted exosome subunit | MSM0244 |
| 1 | COG1503 | Peptide chain release factor 1 (eRF1) | MSM0891 |
| 1 | COG1514 | 2′-5′ RNA ligase | MSM0054 |
| 1 | COG1534 | Predicted RNA-binding protein containing KH domain, possibly | MSM0710 |
| | | ribosomal protein | |
| 2 | COG1549 | Queuine tRNA-ribosyltransferases, contain PUA domain | MSM0633, MSM0797 |
| 1 | COG1552 | Ribosomal protein L40E | MSM0125 |
| 1 | COG1588 | RNase P/RNase MRP subunit p29 | MSM0753 |
| 1 | COG1601 | Translation initiation factor 2, beta subunit (eIF-2beta)/eIF-5 N- | MSM0511 |
| | | terminal domain | |
| 1 | COG1603 | RNase P/RNase MRP subunit p30 | MSM0247 |
| 1 | COG1631 | Ribosomal protein L44E | MSM1135 |
| 1 | COG1632 | Ribosomal protein L15E | MSM0298 |
| 1 | COG1670 | Acetyltransferases, including N-acetylases of ribosomal proteins | MSM1573 |
| 1 | COG1676 | tRNA splicing endonuclease | MSM0217 |
| 1 | COG1717 | Ribosomal protein L32E | MSM0744 |
| 1 | COG1727 | Ribosomal protein L18E | MSM1429 |
| 1 | COG1736 | Diphthamide synthase subunit DPH2 | MSM1358 |
| 1 | COG1746 | tRNA nucleotidyltransferase (CCA-adding enzyme) | MSM0053 |
| 1 | COG1798 | Diphthamide biosynthesis methyltransferase | MSM0801 |
| 1 | COG1841 | Ribosomal protein L30/L7E | MSM0740 |
| 1 | COG1867 | N2,N2-dimethylguanosine tRNA methyltransferase | MSM1031 |
| 1 | COG1889 | Fibrillarin-like rRNA methylase | MSM1047 |
| 1 | COG1890 | Ribosomal protein S3AE | MSM0661 |
| 1 | COG1911 | Ribosomal protein L30E | MSM0907 |
| 1 | COG1976 | Translation initiation factor 6 (eIF-6) | MSM0704 |
| 1 | COG1997 | Ribosomal protein L37AE/L43A | MSM1630 |
| 1 | COG1998 | Ribosomal protein S27AE | MSM0193 |
| 1 | COG2004 | Ribosomal protein S24E | MSM0194 |
| 1 | COG2007 | Ribosomal protein S8E | MSM1486 |
| 1 | COG2016 | Predicted RNA-binding protein (contains PUA domain) | MSM0183 |
| 1 | COG2023 | RNase P subunit RPR2 | MSM0711 |
| 1 | COG2051 | Ribosomal protein S27E | MSM1134 |
| 1 | COG2053 | Ribosomal protein S28E/S33 | MSM0205 |
| 1 | COG2075 | Ribosomal protein L24E | MSM0204 |
| 1 | COG2092 | Translation elongation factor EF-1beta | MSM0602 |
| 1 | COG2097 | Ribosomal protein L31E | MSM0705 |
| 1 | COG2117 | Predicted subunit of tRNA(5-methylaminomethyl-2-thiouridylate) | MSM0707 |
| | | methyltransferase, contains the PP-loop ATPase domain | |
| 1 | COG2123 | RNase PH-related exoribonuclease | MSM0241 |
| 1 | COG2125 | Ribosomal protein S6E (S10) | MSM0201 |
| 1 | COG2126 | Ribosomal protein L37E | MSM0181 |
| 1 | COG2139 | Ribosomal protein L21E | MSM1377 |
| 1 | COG2147 | Ribosomal protein L19E | MSM0743 |
| 1 | COG2157 | Ribosomal protein L20A (L18A) | MSM0703 |
| 1 | COG2163 | Ribosomal protein L14E/L6E/L27E | MSM0733 |
| 1 | COG2167 | Ribosomal protein L39E | MSM0706 |
| 1 | COG2174 | Ribosomal protein L34E | MSM0735 |
| 1 | COG2238 | Ribosomal protein S19E (S16A) | MSM0709 |
| 1 | COG2260 | Predicted Zn-ribbon RNA-binding protein | MSM1132 |
| 1 | COG2263 | Predicted RNA methylase | MSM0764 |
| 1 | COG2511 | Archaeal Glu-tRNA Gln amidotransferase subunit E (contains GAD | MSM0335 |
| | | domain) | |
| 1 | COG2519 | tRNA(1-methyladenosine) methyltransferase and related | MSM1173 |
| | | methyltransferases | |
| 1 | COG2888 | Predicted Zn-ribbon RNA-binding protein with a function in | MSM0603 |
| | | translation | |
| 1 | COG2890 | Methylase of polypeptide chain release factors | MSM1373 |
| 1 | COG3277 | RNA-binding protein involved in rRNA processing | MSM0425 |
| 1 | COG5256 | Translation elongation factor EF-1alpha (GTPase) | MSM0898 |
| 1 | COG5257 | Translation initiation factor 2, gamma subunit (eIF-2gamma; | MSM0200 |
| | | GTPase) | |

Transcription (K)

| | | | |
|---|---|---|---|
| 2 | COG0085 | DNA-directed RNA polymerase, beta subunit/140 kD subunit | MSM0910, MSM0911 |
| 2 | COG0086 | DNA-directed RNA polymerase, beta′ subunit/160 kD subunit | MSM0908, MSM0909 |
| 1 | COG0195 | Transcription elongation factor | MSM0906 |
| 1 | COG0202 | DNA-directed RNA polymerase, alpha subunit/40 kD subunit | MSM1428 |
| 1 | COG0250 | Transcription antiterminator | MSM0624 |
| 1 | COG0571 | dsRNA-specific ribonuclease | MSM0176 |
| 1 | COG0583 | Transcriptional regulator | MSM1390 |
| 3 | COG0640 | Predicted transcriptional regulators | MSM0819, MSM1126, |
| | | | MSM1350 |
| 1 | COG0789 | Predicted transcriptional regulators | MSM0949 |
| 1 | COG0846 | NAD-dependent protein deacetylases, SIR2 family | MSM1087 |
| 1 | COG0864 | Predicted transcriptional regulators containing the CopG/Arc/MetJ | MSM0364 |
| | | DNA-binding domain and a metal-binding domain | |
| 1 | COG1095 | DNA-directed RNA polymerase, subunit E′ | MSM0197 |
| 1 | COG1293 | Predicted RNA-binding protein homologous to eukaryotic snRNP | MSM0778 |
| 1 | COG1308 | Transcription factor homologous to NACalpha-BTF3 | MSM0384 |
| 2 | COG1309 | Transcriptional regulator | MSM0094, MSM0650 |
| 1 | COG1321 | Mn-dependent transcriptional regulator | MSM0218 |
| 1 | COG1378 | Predicted transcriptional regulators | MSM1445 |
| 1 | COG1395 | Predicted transcriptional regulator | MSM0453 |
| 3 | COG1396 | Predicted transcriptional regulators | MSM0026, MSM0329, |
| | | | MSM1528 |
| 1 | COG1405 | Transcription initiation factor TFIIIB, Brf1 subunit/Transcription | MSM0424 |
| | | initiation factor TFIIB | |
| 1 | COG1476 | Predicted transcriptional regulators | MSM1150 |
| 1 | COG1497 | Predicted transcriptional regulator | MSM1499 |
| 1 | COG1522 | Transcriptional regulators | MSM1032 |
| 1 | COG1581 | Archaeal DNA-binding protein | MSM1245 |
| 3 | COG1594 | DNA-directed RNA polymerase, subunit M/Transcription elongation | MSM1354, MSM1720, |
| | | factor TFIIS | MSM1763 |
| 1 | COG1644 | DNA-directed RNA polymerase, subunit N (RpoN/RPB10) | MSM1432 |
| 1 | COG1675 | Transcription initiation factor IIE, alpha subunit | MSM0631 |
| 1 | COG1695 | Predicted transcriptional regulators | MSM1250 |
| 1 | COG1733 | Predicted transcriptional regulators | MSM0864 |
| 1 | COG1758 | DNA-directed RNA polymerase, subunit K/omega | MSM1433 |
| 1 | COG1761 | DNA-directed RNA polymerase, subunit L | MSM1356 |
| 1 | COG1777 | Predicted transcriptional regulators | MSM1107 |
| 1 | COG1813 | Predicted transcription factor, homolog of eukaryotic MBF1 | MSM0355 |
| 3 | COG1846 | Transcriptional regulators | MSM0413, MSM0600, |
| | | | MSM1230 |
| 2 | COG1958 | Small nuclear ribonucleoprotein (snRNP) homolog | MSM0182, MSM1220 |
| 1 | COG1996 | DNA-directed RNA polymerase, subunit RPC10 (contains C4-type | MSM1631 |
| | | Zn-finger) | |
| 1 | COG2012 | DNA-directed RNA polymerase, subunit H, RpoH/RPB5 | MSM0912 |
| 1 | COG2093 | DNA-directed RNA polymerase, subunit E″ | MSM0196 |
| 1 | COG2101 | TATA-box binding protein (TBP), component of TFIID and TFIIIB | MSM0720 |
| 1 | COG2183 | Transcriptional accessory protein | MSM1292 |
| 1 | COG2207 | AraC-type DNA-binding domain-containing proteins | MSM0775 |
| 1 | COG2524 | Predicted transcriptional regulator, contains C-terminal CBS | MSM1614 |
| | | domains | |
| 2 | COG2865 | Predicted transcriptional regulator containing an HTH domain and | MSM0540, MSM1315 |
| | | an uncharacterized domain shared with the mammalian protein | |
| | | Schlafen | |
| 1 | COG4008 | Predicted metal-binding transcription factor | MSM0969 |
| 3 | COG4742 | Predicted transcriptional regulator | MSM0404, MSM0817, |
| | | | MSM0818 |

Replication, Recombination and Repair (L)

| | | | |
|---|---|---|---|
| 2 | COG0084 | Mg-dependent DNase | MSM0097, MSM0416 |
| 1 | COG0122 | 3-methyladenine DNA glycosylase/8-oxoguanine DNA glycosylase | MSM1365 |
| 1 | COG0164 | Ribonuclease HII | MSM0979 |
| 2 | COG0177 | Predicted EndoIII-related endonuclease | MSM0272, MSM1584 |
| 1 | COG0178 | Excinuclease ATPase subunit | MSM1581 |
| 2 | COG0188 | Type IIA topoisomerase (DNA gyrase/topo II, topoisomerase IV), A | MSM1353, MSM1775 |
| | | subunit | |
| 5 | COG0210 | Superfamily I DNA and RNA helicases | MSM0058, MSM0113, |
| | | | MSM0731, MSM1420, |
| | | | MSM1771 |
| 1 | COG0258 | 5′-3′ exonuclease (including N-terminal domain of Poll) | MSM0725 |
| 1 | COG0270 | Site-specific DNA methylase | MSM0531 |
| 1 | COG0322 | Nuclease subunit of the excinuclease complex | MSM1695 |
| 1 | COG0350 | Methylated DNA-protein cysteine methyltransferase | MSM1185 |
| 1 | COG0358 | DNA primase (bacterial type) | MSM0427 |
| 2 | COG0417 | DNA polymerase elongation subunit (family B) | MSM1041, MSM1481 |
| 3 | COG0419 | ATPase involved in DNA repair | MSM0120, MSM0693, |
| | | | MSM1761 |
| 1 | COG0420 | DNA repair exonuclease | MSM0121 |
| 2 | COG0468 | RecA/RadA recombinase | MSM0611, MSM1333 |
| 2 | COG0470 | ATPase involved in DNA replication | MSM1176, MSM1177 |
| 1 | COG0550 | Topoisomerase IA | MSM0717 |
| 1 | COG0556 | Helicase subunit of the DNA excision repair complex | MSM1579 |
| 3 | COG0582 | Integrase | MSM0428, MSM1640, |
| | | | MSM1742 |
| 1 | COG0592 | DNA polymerase sliding clamp subunit (PCNA homolog) | MSM1137 |
| 2 | COG0608 | Single-stranded DNA-specific exonuclease | MSM1193, MSM1500 |
| 1 | COG0648 | Endonuclease IV | MSM0963 |
| 1 | COG0708 | Exonuclease III | MSM1479 |
| 1 | COG1041 | Predicted DNA modification methylase | MSM0352 |
| 1 | COG1107 | Archaea-specific RecJ-like exonuclease, contains DnaJ-type Zn | MSM0260 |
| | | finger domain | |
| 1 | COG1111 | ERCC4-like helicases | MSM1187 |
| 2 | COG1112 | Superfamily I DNA and RNA helicases and helicase subunits | MSM1081, MSM1694 |
| 1 | COG1193 | Mismatch repair ATPase (MutS family) | MSM0524 |
| 1 | COG1241 | Predicted ATPase involved in replication control, Cdc46/Mcm | MSM0510 |
| | | family | |
| 1 | COG1311 | Archaeal DNA polymerase II, small subunit/DNA polymerase delta, | MSM1271 |
| | | subunit B | |
| 1 | COG1343 | Uncharacterized protein predicted to be involved in DNA repair | MSM0163 |
| 1 | COG1389 | DNA topoisomerase VI, subunit B | MSM0955 |
| 2 | COG1468 | RecB family exonuclease | MSM0165, MSM1059 |
| 2 | COG1518 | Uncharacterized protein predicted to be involved in DNA repair | MSM0023, MSM0164 |
| 1 | COG1525 | Micrococcal nuclease (thermonuclease) homologs | MSM1495 |
| 1 | COG1533 | DNA repair photolyase | MSM0543 |
| 1 | COG1570 | Exonuclease VII, large subunit | MSM0001 |
| 1 | COG1583 | Uncharacterized protein predicted to be involved in DNA repair | MSM0170 |
| | | (RAMP superfamily) | |
| 1 | COG1591 | Holliday junction resolvase - archaeal type | MSM1098 |
| 1 | COG1599 | Single-stranded DNA-binding replication protein A (RPA), large (70 kD) | MSM1332 |
| | | subunit and related ssDNA-binding proteins | |
| 1 | COG1637 | Predicted nuclease of the RecB family | MSM0497 |
| 1 | COG1688 | Uncharacterized protein predicted to be involved in DNA repair | MSM0167 |
| | | (RAMP superfamily) | |
| 1 | COG1697 | DNA topoisomerase VI, subunit A | MSM0956 |
| 1 | COG1793 | ATP-dependent DNA ligase | MSM0645 |
| 1 | COG1857 | Uncharacterized protein predicted to be involved in DNA repair | MSM0168 |
| 1 | COG1933 | Archaeal DNA polymerase II, large subunit | MSM1384 |
| 1 | COG2219 | Eukaryotic-type DNA primase, large subunit | MSM0073 |
| 1 | COG2231 | Uncharacterized protein related to Endonuclease III | MSM1475 |
| 2 | COG3335 | Transposase and inactivated derivatives | MSM0460, MSM1589 |
| 1 | COG3359 | Predicted exonuclease | MSM0138 |
| 2 | COG3415 | Transposase and inactivated derivatives | MSM0458, MSM1588 |
| 5 | COG3464 | Transposase and inactivated derivatives | MSM0087, MSM0230, |
| | | | MSM0396, MSM1093, |
| | | | MSM1566 |
| 1 | COG3666 | Transposase and inactivated derivatives | MSM1523 |

Chromatin Structure and Dynamics (B)

| | | | |
|---|---|---|---|
| 3 | COG2036 | Histones H3 and H4 | MSM0213, MSM0844, |
| | | | MSM1260 |

Cell Cycle Control (D)

| | | | |
|---|---|---|---|
| 3 | COG0037 | Predicted ATPase of the PP-loop superfamily implicated in cell | MSM0553, MSM1028, |
| | | cycle control | MSM1178 |
| 1 | COG0489 | ATPases involved in chromosome partitioning | MSM0045 |
| 1 | COG1077 | Actin-like ATPase involved in cell morphogenesis | MSM0980 |
| 1 | COG1192 | ATPases involved in chromosome partitioning | MSM1241 |

Defense Mechanisms (V)

| | | | |
|---|---|---|---|
| 5 | COG0534 | Na+-driven multidrug efflux pump | MSM0152, MSM0252, |
| | | | MSM0414, MSM1228, |
| | | | MSM1229 |
| 2 | COG0577 | ABC-type antimicrobial peptide transport system, permease | MSM0856, MSM1400 |
| | | component | |
| 2 | COG0732 | Restriction endonuclease S subunits | MSM0157, MSM0158 |
| 2 | COG0842 | ABC-type multidrug transport system, permease component | MSM1248, MSM1484 |
| 6 | COG1002 | Type II restriction enzyme, methylase subunits | MSM1743, MSM1744, |
| | | | MSM1745, MSM1746, |
| | | | MSM1747, MSM1748 |
| 3 | COG1131 | ABC-type multidrug transport system, ATPase component | MSM0593, MSM1249, |
| | | | MSM1483 |
| 2 | COG1132 | ABC-type multidrug transport system, ATPase and permease | MSM0773, MSM0774 |
| | | components | |
| 1 | COG1136 | ABC-type antimicrobial peptide transport system, ATPase | MSM0857 |
| | | component | |
| 1 | COG1715 | Restriction endonuclease | MSM1752 |
| 1 | COG1968 | Uncharacterized bacitracin resistance protein | MSM1201 |
| 1 | COG4845 | Chloramphenicol O-acetyltransferase | MSM0047 |

Signal Transduction Mechanisms (T)

| | | | |
|---|---|---|---|
| 3 | COG0589 | Universal stress protein UspA and related nucleotide-binding | MSM0485, MSM0887, |
| | | proteins | MSM1699 |
| 5 | COG3448 | CBS-domain-containing membrane protein | MSM0305, MSM0484, |
| | | | MSM0790, MSM1053, |
| | | | MSM1054 |

Cell Wall/Membrane Biogenesis (M)

| | | | |
|---|---|---|---|
| 1 | COG0381 | UDP-N-acetylglucosamine 2-epimerase | MSM0853 |
| 3 | COG0399 | Predicted pyridoxal phosphate-dependent enzyme apparently | MSM0347, MSM1030, |
| | | involved in regulation of cell wall biogenesis | MSM1536 |
| 4 | COG0438 | Glycosyltransferase | MSM0836, MSM1313, |
| | | | MSM1317, MSM1322 |
| 1 | COG0449 | Glucosamine 6-phosphate synthetase, contains amidotransferase | MSM1551 |
| | | and phosphosugar isomerase domains | |
| 14 | COG0463 | Glycosyltransferases involved in cell wall biogenesis | MSM0423, MSM1290, |
| | | | MSM1294, MSM1297, |
| | | | MSM1310, MSM1311, |
| | | | MSM1312, MSM1316, |
| | | | MSM1323, MSM1324, |
| | | | MSM1328, MSM1545, |
| | | | MSM1623, MSM1627 |
| 2 | COG0472 | UDP-N-acetylmuramyl pentapeptide phosphotransferase/UDP- | MSM0066, MSM0360 |
| | | Nacetylglucosamine-1-phosphate transferase | |
| 1 | COG0562 | UDP-galactopyranose mutase | MSM1502 |
| 1 | COG0668 | Small-conductance mechanosensitive channel | MSM0493 |
| 1 | COG0677 | UDP-N-acetyl-D-mannosaminuronate dehydrogenase | MSM1303 |
| 1 | COG0707 | pfam match to MurG; not predicted to be a carbohydrate active | MSM0638 |
| | | enzyme by CAZy | |
| 1 | COG0750 | Predicted membrane-associated Zn-dependent proteases 1 | MSM1344 |
| 3 | COG0769 | UDP-N-acetylmuramyl tripeptide synthase | MSM0359, MSM1139, |
| | | | MSM1570 |
| 1 | COG0770 | UDP-N-acetylmuramyl pentapeptide synthase | MSM0880 |
| 1 | COG0771 | UDP-N-acetylmuramoylalanine-D-glutamate ligase | MSM0118 |
| 1 | COG0773 | UDP-N-acetylmuramate-alanine ligase | MSM1190 |
| 1 | COG0794 | Predicted sugar phosphate isomerase involved in capsule | MSM1391 |
| | | formation | |
| 1 | COG1004 | Predicted UDP-glucose 6-dehydrogenase | MSM1612 |
| 1 | COG1083 | CMP-N-acetylneuraminic acid synthetase | MSM0944 |
| 1 | COG1087 | UDP-glucose 4-epimerase | MSM1702 |
| 1 | COG1088 | dTDP-D-glucose 4,6-dehydratase | MSM1309 |
| 1 | COG1091 | dTDP-4-dehydrorhamnose reductase | MSM1304 |
| 1 | COG1209 | dTDP-glucose pyrophosphorylase | MSM1307 |
| 1 | COG1210 | UDP-glucose pyrophosphorylase | MSM1604 |
| 1 | COG1861 | Spore coat polysaccharide biosynthesis protein F, CMP-KDO | MSM1537 |
| | | synthetase homolog | |
| 1 | COG1887 | Putative glycosyl/glycerophosphate transferases involved in | MSM1327 |
| | | teichoic acid biosynthesis TagF/TagB/EpsJ/RodC | |
| 1 | COG1898 | dTDP-4-dehydrorhamnose 3,5-epimerase and related enzymes | MSM1308 |
| 1 | COG2089 | Sialic acid synthase | MSM1539 |
| 1 | COG2148 | Sugar transferases involved in lipopolysaccharide synthesis | MSM1331 |
| 1 | COG2222 | Predicted phosphosugar isomerases | MSM0872 |
| 2 | COG2230 | Cyclopropane fatty acid synthase and related methyltransferases | MSM0274, MSM0490 |
| 1 | COG2843 | Putative enzyme of poly-gamma-glutamate biosynthesis (capsule | MSM0700 |
| | | formation) | |
| 1 | COG3049 | Penicillin V acylase and related amidases | MSM0986 |
| 3 | COG3475 | LPS biosynthesis protein | MSM1512, MSM1515, |
| | | | MSM1544 |
| 1 | COG3764 | Sortase (surface protein transpeptidase) | MSM0984 |
| 1 | COG3980 | Spore coat polysaccharide biosynthesis protein, predicted | MSM1538 |
| | | glycosyltransferase | |

Cell Motility (N)

| | | | |
|---|---|---|---|
| 1 | COG3351 | Putative archaeal flagellar protein D/E | MSM0137 |
| 2 | COG5651 | PPE-repeat proteins | MSM1586, MSM1590 |

Cytoskeleton (Z)

| | | | |
|---|---|---|---|
| 1 | COG5023 | Tubulin | MSM1794 |

Intracellular Trafficking and Secretion (U)

| | | | |
|---|---|---|---|
| 1 | COG0201 | Preprotein translocase subunit SecY | MSM0738 |
| 1 | COG0541 | Signal recognition particle GTPase | MSM1360 |
| 1 | COG0552 | Signal recognition particle GTPase | MSM0701 |
| 2 | COG0681 | Signal peptidase I | MSM0232, MSM1232 |
| 3 | COG0811 | Biopolymer transport proteins | MSM0978, MSM1401, |
| | | | MSM1718 |
| 1 | COG0848 | Biopolymer transport protein | MSM0977 |
| 1 | COG1400 | Signal recognition particle 19 kDa protein | MSM1501 |
| 1 | COG2443 | Preprotein translocase subunit Sss1 | MSM0625 |
| 2 | COG3210 | Large exoproteins involved in heme utilization or adhesion | MSM0461, MSM1398 |
| 1 | COG4023 | Preprotein translocase subunit Sec61beta | MSM1363 |
| 1 | COG4962 | Flp pilus assembly protein, ATPase CpaF | MSM0597 |
| 2 | COG4965 | Flp pilus assembly protein TadB | MSM0471, MSM0596 |

Post-translational Modification, Protein Turnover, Chaperones (O)

| | | | |
|---|---|---|---|
| 1 | COG0068 | Hydrogenase maturation factor | MSM1106 |
| 1 | COG0071 | Molecular chaperone (small heat shock protein) | MSM0870 |
| 1 | COG0225 | Peptide methionine sulfoxide reductase | MSM0582 |
| 1 | COG0298 | Hydrogenase maturation factor | MSM0636 |
| 1 | COG0309 | Hydrogenase maturation factor | MSM1492 |
| 1 | COG0396 | ABC-type transport system involved in Fe—S cluster assembly, | MSM1003 |
| | | ATPase component | |
| 1 | COG0409 | Hydrogenase maturation factor | MSM0945 |
| 1 | COG0443 | Molecular chaperone | MSM1109 |
| 3 | COG0459 | Chaperonin GroEL (HSP60 family) | MSM0220, MSM0826, |
| | | | MSM1533 |
| 1 | COG0464 | ATPases of the AAA+ class | MSM0642 |
| 1 | COG0484 | DnaJ-class molecular chaperone with C-terminal Zn finger domain | MSM1110 |
| 1 | COG0492 | Thioredoxin reductase | MSM0340 |
| 2 | COG0501 | Zn-dependent protease with chaperone function | MSM1174, MSM1203 |
| 1 | COG0533 | Metal-dependent proteases with possible chaperone activity | MSM1198 |
| 1 | COG0576 | Molecular chaperone GrpE (heat shock protein) | MSM1108 |
| 1 | COG0602 | Organic radical activating enzymes | MSM1055 |
| 2 | COG0638 | 20S proteasome, alpha and beta subunits | MSM0245, MSM1037 |
| 1 | COG0652 | Peptidyl-prolyl cis-trans isomerase (rotamase) - cyclophilin family | MSM1367 |
| 1 | COG0719 | ABC-type transport system involved in Fe—S cluster assembly, | MSM1002 |
| | | permease component | |
| 1 | COG0785 | Cytochrome c biogenesis protein | MSM0549 |
| 3 | COG0826 | Collagenase and related proteases | MSM0522, MSM0523, |
| | | | MSM1705 |
| 1 | COG1047 | FKBP-type peptidyl-prolyl cis-trans isomerases 2 | MSM0930 |
| 1 | COG1067 | Predicted ATP-dependent protease | MSM1569 |
| 3 | COG1180 | Pyruvate-formate lyase-activating enzyme | MSM0538, MSM0652, |
| | | | MSM1284 |
| 1 | COG1222 | ATP-dependent 26S proteasome regulatory subunit | MSM0354 |
| 1 | COG1382 | Prefoldin, chaperonin cofactor | MSM1634 |
| 1 | COG1397 | ADP-ribosylglycohydrolase | MSM1572 |
| 1 | COG1730 | Predicted prefoldin, molecular chaperone implicated in de novo | MSM0702 |
| | | protein folding | |
| 1 | COG1899 | Deoxyhypusine synthase | MSM1615 |
| 1 | COG1973 | Hydrogenase maturation factor | MSM1158 |
| 1 | COG2143 | Thioredoxin-related protein | MSM0550 |
| 1 | COG4070 | Predicted peptidyl-prolyl cis-trans isomerase (rotamase), | MSM0813 |
| | | cyclophilin family | |
| 1 | COG4930 | Predicted ATP-dependent Lon-type protease | MSM1754 |

Energy Production and Conversion (C)

| | | | |
|---|---|---|---|
| 1 | COG0045 | Succinyl-CoA synthetase, beta subunit | MSM0924 |
| 1 | COG0074 | Succinyl-CoA synthetase, alpha subunit | MSM0228 |
| 1 | COG0221 | Inorganic pyrophosphatase | MSM0198 |
| 1 | COG0240 | Glycerol-3-phosphate dehydrogenase | MSM1540 |
| 2 | COG0243 | Anaerobic dehydrogenases, typically selenocysteine-containing | MSM1404, MSM1463 |
| 1 | COG0247 | Fe—S oxidoreductase | MSM1625 |
| 1 | COG0371 | Glycerol dehydrogenase and related enzymes | MSM0286 |
| 1 | COG0372 | Citrate synthase | MSM0446 |
| 2 | COG0426 | Uncharacterized flavoproteins | MSM0222, MSM1349 |
| 1 | COG0479 | Succinate dehydrogenase/fumarate reductase, Fe—S protein | MSM0393 |
| | | subunit | |
| 1 | COG0636 | F0F1-type ATP synthase, subunit c/Archaeal/vacuolar-type H+- | MSM0439 |
| | | ATPase, subunit K | |
| 1 | COG0644 | Dehydrogenases (flavoproteins) | MSM1701 |
| 2 | COG0650 | Formate hydrogenlyase subunit 4 | MSM0317, MSM1062 |
| 3 | COG0674 | Pyruvate:ferredoxin oxidoreductase and related 2- | MSM0332, MSM0559, |
| | | oxoacid:ferredoxin oxidoreductases, alpha subunit | MSM0927 |
| 1 | COG0680 | Ni,Fe-hydrogenase maturation factor | MSM1123 |
| 3 | COG0716 | Flavodoxins | MSM0062, MSM0503, |
| | | | MSM0861 |
| 1 | COG0731 | Fe—S oxidoreductases | MSM0922 |
| 4 | COG0778 | Nitroreductase | MSM0445, MSM1293, |
| | | | MSM1574, MSM1722 |
| 1 | COG0822 | NifU homolog involved in Fe—S cluster formation | MSM0263 |
| 1 | COG1012 | NAD-dependent aldehyde dehydrogenases | MSM0467 |
| 3 | COG1013 | Pyruvate:ferredoxin oxidoreductase and related 2- | MSM0333, MSM0560, |
| | | oxoacid:ferredoxin oxidoreductases, beta subunit | MSM0926 |
| 3 | COG1014 | Pyruvate:ferredoxin oxidoreductase and related 2- | MSM0391, MSM0557, |
| | | oxoacid:ferredoxin oxidoreductases, gamma subunit | MSM0925 |
| 1 | COG1029 | Formylmethanofuran dehydrogenase subunit B | MSM1412 |
| 2 | COG1032 | Fe—S oxidoreductase | MSM0696, MSM0787 |
| 4 | COG1035 | Coenzyme F420-reducing hydrogenase, beta subunit | MSM0135, MSM1121, |
| | | | MSM1405, MSM1462 |
| 1 | COG1036 | Archaeal flavoproteins | MSM1338 |
| 1 | COG1042 | Acyl-CoA synthetase (NDP forming) | MSM1471 |
| 1 | COG1053 | Succinate dehydrogenase/fumarate reductase, flavoprotein subunit | MSM1258 |
| 1 | COG1139 | Uncharacterized conserved protein containing a ferredoxin-like | MSM1626 |
| | | domain | |
| 2 | COG1142 | Fe—S-cluster-containing hydrogenase components 2 | MSM0561, MSM0562 |
| 2 | COG1143 | Formate hydrogenlyase subunit 6/NADH:ubiquinone | MSM0998, MSM1065 |
| | | oxidoreductase 23 kD subunit (chain I) | |
| 1 | COG1144 | Pyruvate:ferredoxin oxidoreductase and related 2- | MSM0558 |
| | | oxoacid:ferredoxin oxidoreductases, delta subunit | |
| 12 | COG1145 | Ferredoxin | MSM0136, MSM0306, |
| | | | MSM0310, MSM0311, |
| | | | MSM0395, MSM0579, |
| | | | MSM0783, MSM0784, |
| | | | MSM1066, MSM1409, |
| | | | MSM1410, MSM1700 |
| 5 | COG1146 | Ferredoxin | MSM0085, MSM0209, |
| | | | MSM0331, MSM0928, |
| | | | MSM1408 |
| 2 | COG1148 | Heterodisulfide reductase, subunit A and related polyferredoxins | MSM0082, MSM1336 |
| 2 | COG1150 | Heterodisulfide reductase, subunit C | MSM0084, MSM0796 |
| 1 | COG1151 | 6Fe—6S prismane cluster-containing protein | MSM1446 |
| 1 | COG1153 | Formylmethanofuran dehydrogenase subunit D | MSM1411 |
| 1 | COG1155 | Archaeal/vacuolar-type H+-ATPase subunit A | MSM0435 |
| 1 | COG1156 | Archaeal/vacuolar-type H+-ATPase subunit B | MSM0434 |
| 1 | COG1229 | Formylmethanofuran dehydrogenase subunit A | MSM1413 |
| 1 | COG1249 | Pyruvate/2-oxoglutarate dehydrogenase complex, | MSM0637 |
| | | dihydrolipoamide dehydrogenase (E3) component, and related | |
| | | enzymes | |
| 1 | COG1269 | Archaeal/vacuolar-type H+-ATPase subunit I | MSM0440 |
| 1 | COG1304 | L-lactate dehydrogenase (FMN-dependent) and related alpha- | MSM1441 |
| | | hydroxy acid dehydrogenases | |
| 1 | COG1390 | Archaeal/vacuolar-type H+-ATPase subunit E | MSM0438 |
| 1 | COG1394 | Archaeal/vacuolar-type H+-ATPase subunit D | MSM0433 |
| 2 | COG1413 | FOG: HEAT repeat | MSM0372, MSM0501 |
| 1 | COG1436 | Archaeal/vacuolar-type H+-ATPase subunit F | MSM0436 |
| 2 | COG1526 | Uncharacterized protein required for formate dehydrogenase | MSM0295, MSM1392 |
| | | activity | |
| 1 | COG1527 | Archaeal/vacuolar-type H+-ATPase subunit C | MSM0437 |
| 2 | COG1592 | Rubrerythrin | MSM1348, MSM1733 |
| 1 | COG1600 | Uncharacterized Fe—S protein | MSM0609 |
| 1 | COG1625 | Fe—S oxidoreductase, related to NifB/MoaA family | MSM1020 |
| 2 | COG1773 | Rubredoxin | MSM0187, MSM0188 |
| 2 | COG1838 | Tartrate dehydratase beta subunit/Fumarate hydratase class I, C- | MSM0769, MSM0929 |
| | | terminal domain | |
| 2 | COG1908 | Coenzyme F420-reducing hydrogenase, delta subunit | MSM1001, MSM1461 |
| 2 | COG1941 | Coenzyme F420-reducing hydrogenase, gamma subunit | MSM1000, MSM1122 |
| 2 | COG1951 | Tartrate dehydratase alpha subunit/Fumarate hydratase class I, N- | MSM0447, MSM0563 |
| | | terminal domain | |
| 1 | COG2033 | Desulfoferrodoxin | MSM0262 |
| 2 | COG2037 | Formylmethanofuran:tetrahydromethanopterin formyltransferase | MSM0308, MSM1092 |
| 2 | COG2048 | Heterodisulfide reductase, subunit B | MSM0083, MSM0795 |
| 1 | COG2055 | Malate/L-lactate dehydrogenases | MSM1040 |
| 1 | COG2141 | Coenzyme F420-dependent N5,N10-methylene | MSM0542 |
| | | tetrahydromethanopterin reductase and related flavin-dependent | |
| | | oxidoreductases | |
| 1 | COG2191 | Formylmethanofuran dehydrogenase subunit E | MSM1396 |
| 1 | COG2218 | Formylmethanofuran dehydrogenase subunit C | MSM1414 |
| 1 | COG2710 | Nitrogenase molybdenum-iron protein, alpha and beta chains | MSM1160 |
| 1 | COG2811 | Archaeal/vacuolar-type H+-ATPase subunit H | MSM0441 |
| 2 | COG3259 | Coenzyme F420-reducing hydrogenase, alpha subunit | MSM0999, MSM1124 |
| 1 | COG3260 | Ni,Fe-hydrogenase III small subunit | MSM1064 |
| 1 | COG3261 | Ni,Fe-hydrogenase III large subunit | MSM1063 |
| 2 | COG4231 | Indolepyruvate ferredoxin oxidoreductase, alpha and beta subunits | MSM0392, MSM1460 |
| 1 | COG5016 | Pyruvate/oxaloacetate carboxyltransferase | MSM0939 |

Carbohydrate Transport and Metabolism (G)

| | | | |
|---|---|---|---|
| 1 | COG0057 | Glyceraldehyde-3-phosphate dehydrogenase/erythrose-4- | MSM0962 |
| | | phosphate dehydrogenase | |
| 1 | COG0063 | Predicted sugar kinase | MSM1091 |
| 1 | COG0120 | Ribose 5-phosphate isomerase | MSM0284 |
| 1 | COG0126 | 3-phosphoglycerate kinase | MSM0918 |
| 1 | COG0148 | Enolase | MSM1435 |
| 1 | COG0149 | Triosephosphate isomerase | MSM0919 |
| 1 | COG0235 | Ribulose-5-phosphate 4-epimerase and related epimerases and | MSM1270 |
| | | aldolases | |
| 1 | COG0483 | Archaeal fructose-1,6-bisphosphatase and related enzymes of | MSM0879 |
| | | inositol monophosphatase family | |
| 3 | COG0524 | Sugar kinases, ribokinase family | MSM0307, MSM1389, |
| | | | MSM1693 |
| 2 | COG0574 | Phosphoenolpyruvate synthase/pyruvate phosphate dikinase | MSM0823, MSM0988 |
| 1 | COG0580 | Glycerol uptake facilitator and related permeases (Major Intrinsic | MSM1085 |
| | | Protein Family) | |
| 2 | COG1082 | Sugar phosphate isomerases/epimerases | MSM1184, MSM1251 |
| 2 | COG1109 | Phosphomannomutase | MSM0648, MSM0656 |
| 1 | COG1363 | Cellulase M and related proteins | MSM0134 |
| 1 | COG1830 | DhnA-type fructose-1,6-bisphosphate aldolase and related enzymes | MSM0056 |
| 1 | COG1980 | Archaeal fructose 1,6-bisphosphatase | MSM0615 |
| 2 | COG2074 | 2-phosphoglycerate kinase | MSM0408, MSM0791 |
| 2 | COG2730 | Endoglucanase | MSM1051, MSM1125 |
| 2 | COG2814 | Arabinose efflux permease | MSM1459, MSM1465 |
| 2 | COG3635 | Predicted phosphoglycerate mutase, AP superfamily | MSM0153, MSM0657 |
| 1 | COG5297 | Cellobiohydrolase A (1,4-beta-cellobiosidase A) | MSM0958 |

Amino Acid Transport and Metabolism (E)

| | | | |
|---|---|---|---|
| 1 | COG0002 | Acetylglutamate semialdehyde dehydrogenase | MSM0860 |
| 1 | COG0006 | Xaa-Pro aminopeptidase | MSM0472 |
| 1 | COG0019 | Diaminopimelate decarboxylase | MSM1371 |
| 1 | COG0031 | Cysteine synthase | MSM0271 |
| 1 | COG0040 | ATP phosphoribosyltransferase | MSM1261 |
| 2 | COG0065 | 3-isopropylmalate dehydratase large subunit | MSM0723, MSM1300 |
| 2 | COG0066 | 3-isopropylmalate dehydratase small subunit | MSM0847, MSM1299 |
| 1 | COG0067 | Glutamate synthase domain 1 | MSM0370 |
| 2 | COG0069 | Glutamate synthase domain 2 | MSM0027, MSM0368 |
| 1 | COG0070 | Glutamate synthase domain 3 | MSM0369 |
| 2 | COG0075 | Serine-pyruvate aminotransferase/archaeal aspartate | MSM0677, MSM1513 |
| | | aminotransferase | |
| 1 | COG0076 | Glutamate decarboxylase and related PLP-dependent proteins | MSM0987 |
| 1 | COG0077 | Prephenate dehydratase | MSM1052 |
| 1 | COG0078 | Ornithine carbamoyltransferase | MSM1226 |
| 2 | COG0079 | Histidinol-phosphate/aromatic aminotransferase and cobyric acid | MSM0653, MSM1516 |
| | | decarboxylase | |
| 1 | COG0082 | Chorismate synthase | MSM1474 |
| 1 | COG0106 | Phosphoribosylformimino-5-aminoimidazole carboxamide | MSM0858 |
| | | ribonucleotide (ProFAR) isomerase | |
| 1 | COG0107 | Imidazoleglycerol-phosphate synthase | MSM1364 |
| 1 | COG0112 | Glycine/serine hydroxymethyltransferase | MSM1337 |
| 1 | COG0118 | Glutamine amidotransferase | MSM1159 |
| 3 | COG0119 | Isopropylmalate/homocitrate/citramalate synthases | MSM0350, MSM0722, |
| | | | MSM1246 |
| 1 | COG0128 | 5-enolpyruvylshikimate-3-phosphate synthase | MSM0273 |
| 1 | COG0131 | Imidazoleglycerol-phosphate dehydratase | MSM1206 |
| 1 | COG0133 | Tryptophan synthase beta chain | MSM1142 |
| 1 | COG0134 | Indole-3-glycerol phosphate synthase | MSM1143 |
| 1 | COG0136 | Aspartate-semialdehyde dehydrogenase | MSM0829 |
| 1 | COG0137 | Argininosuccinate synthase | MSM1084 |
| 1 | COG0139 | Phosphoribosyl-AMP cyclohydrolase | MSM1182 |
| 1 | COG0140 | Phosphoribosyl-ATP pyrophosphohydrolase | MSM1103 |
| 1 | COG0141 | Histidinol dehydrogenase | MSM1238 |
| 1 | COG0165 | Argininosuccinate lyase | MSM0192 |
| 1 | COG0169 | Shikimate 5-dehydrogenase | MSM1179 |
| 1 | COG0174 | Glutamine synthetase | MSM1418 |
| 1 | COG0253 | Diaminopimelate epimerase | MSM1372 |
| 1 | COG0287 | Prephenate dehydrogenase | MSM0641 |
| 1 | COG0289 | Dihydrodipicolinate reductase | MSM0830 |
| 1 | COG0334 | Glutamate dehydrogenase/leucine dehydrogenase | MSM0888 |
| 1 | COG0345 | Pyrroline-5-carboxylate reductase | MSM0089 |
| 1 | COG0346 | Lactoylglutathione lyase and related lyases | MSM1366 |
| 1 | COG0347 | Nitrogen regulatory protein PII | MSM0233 |
| 1 | COG0367 | Asparagine synthase (glutamine-hydrolyzing) | MSM0160 |
| 3 | COG0436 | Aspartate/tyrosine/aromatic aminotransferase | MSM0610, MSM0788, |
| | | | MSM1455 |
| 1 | COG0440 | Acetolactate synthase, small (regulatory) subunit | MSM1224 |
| 1 | COG0460 | Homoserine dehydrogenase | MSM0154 |
| 1 | COG0498 | Threonine synthase | MSM0214 |
| 1 | COG0527 | Aspartokinases | MSM0832 |
| 1 | COG0547 | Anthranilate phosphoribosyltransferase | MSM1144 |
| 1 | COG0548 | Acetylglutamate kinase | MSM0375 |
| 1 | COG0560 | Phosphoserine phosphatase | MSM0719 |
| 1 | COG0620 | Methionine synthase II (cobalamin-independent) | MSM0102 |
| 1 | COG0710 | 3-dehydroquinate dehydratase | MSM0231 |
| 1 | COG0747 | ABC-type dipeptide transport system, periplasmic component | MSM0300 |
| 1 | COG0765 | ABC-type amino acid transport system, permease component | MSM0806 |
| 1 | COG1045 | Serine acetyltransferase | MSM0270 |
| 1 | COG1104 | Cysteine sulfinate desulfinase/cysteine desulfurase and related | MSM0264 |
| | | enzymes | |
| 1 | COG1125 | ABC-type proline/glycine betaine transport systems, ATPase | MSM0990 |
| | | components | |
| 1 | COG1126 | ABC-type polar amino acid transport system, ATPase component | MSM0805 |
| 1 | COG1168 | Bifunctional PLP-dependent enzyme with beta-cystathionase and | MSM0044 |
| | | maltose regulon repressor activities | |
| 1 | COG1174 | ABC-type proline/glycine betaine transport systems, permease | MSM0991 |
| | | component | |
| 2 | COG1305 | Transglutaminase-like enzymes, putative cysteine proteases | MSM0219, MSM0786 |
| 1 | COG1465 | Predicted alternative 3-dehydroquinate synthase | MSM0055 |
| 1 | COG1605 | Chorismate mutase | MSM0834 |
| 1 | COG1812 | Archaeal S-adenosylmethionine synthetase | MSM1340 |
| 1 | COG1921 | Selenocysteine synthase [seryl-tRNASer selenium transferase] | MSM0767 |
| 1 | COG2021 | Homoserine acetyltransferase | MSM0496 |
| 1 | COG2061 | ACT-domain-containing protein, predicted allosteric regulator of | MSM0155 |
| | | homoserine dehydrogenase | |
| 1 | COG2303 | Choline dehydrogenase and related flavoproteins | MSM0865 |
| 1 | COG2423 | Predicted ornithine cyclodeaminase, mu-crystallin homolog | MSM1517 |
| 1 | COG2856 | Predicted Zn peptidase | MSM1529 |
| 2 | COG2873 | O-acetylhomoserine sulfhydrylase | MSM0174, MSM0265 |
| 1 | COG4992 | Ornithine/acetylornithine aminotransferase | MSM1368 |

Nucleic Acid Transport and Metabolism (F)

| | | | |
|---|---|---|---|
| 1 | COG0005 | Purine nucleoside phosphorylase | MSM0665 |
| 1 | COG0015 | Adenylosuccinate lyase | MSM1151 |
| 1 | COG0034 | Glutamine phosphoribosylpyrophosphate amidotransferase | MSM1704 |
| 1 | COG0035 | Uracil phosphoribosyltransferase | MSM0398 |
| 1 | COG0041 | Phosphoribosylcarboxyaminoimidazole (NCAIR) mutase | MSM1287 |
| 1 | COG0044 | Dihydroorotase and related cyclic amidohydrolases | MSM0997 |
| 1 | COG0046 | Phosphoribosylformylglycinamidine (FGAM) synthase, synthetase | MSM1342 |
| | | domain | |
| 1 | COG0047 | Phosphoribosylformylglycinamidine (FGAM) synthase, glutamine | MSM1549 |
| | | amidotransferase domain | |
| 1 | COG0104 | Adenylosuccinate synthase | MSM1468 |
| 1 | COG0105 | Nucleoside diphosphate kinase | MSM0203 |
| 2 | COG0125 | Thymidylate kinase | MSM0077, MSM0520 |
| 1 | COG0127 | Xanthosine triphosphate pyrophosphatase | MSM1195 |
| 1 | COG0150 | Phosphoribosylaminoimidazole (AIR) synthetase | MSM1039 |
| 1 | COG0151 | Phosphoribosylamine-glycine ligase | MSM1227 |
| 1 | COG0152 | Phosphoribosylaminoimidazolesuccinocarboxamide (SAICAR) | MSM1547 |
| | | synthase | |
| 1 | COG0167 | Dihydroorotate dehydrogenase | MSM1044 |
| 1 | COG0207 | Thymidylate synthase | MSM1734 |
| 1 | COG0274 | Deoxyribose-phosphate aldolase | MSM0843 |
| 1 | COG0284 | Orotidine-5′-phosphate decarboxylase | MSM1617 |
| 1 | COG0461 | Orotate phosphoribosyltransferase | MSM0821 |
| 1 | COG0503 | Adenine/guanine phosphoribosyltransferases and related PRPP- | MSM1359 |
| | | binding proteins | |
| 1 | COG0504 | CTP synthase (UTP-ammonia lyase) | MSM0147 |
| 1 | COG0516 | IMP dehydrogenase/GMP reductase | MSM1629 |
| 1 | COG0518 | GMP synthase - Glutamine amidotransferase domain | MSM0343 |
| 1 | COG0519 | GMP synthase, PP-ATPase domain/subunit | MSM0345 |
| 1 | COG0528 | Uridylate kinase | MSM0415 |
| 1 | COG0540 | Aspartate carbamoyltransferase, catalytic chain | MSM1263 |
| 2 | COG0717 | Deoxycytidine deaminase | MSM0402, MSM0687 |
| 1 | COG0856 | Orotate phosphoribosyltransferase homologs | MSM0883 |
| 1 | COG1001 | Adenine deaminase | MSM0874 |
| 1 | COG1051 | ADP-ribose pyrophosphatase | MSM1355 |
| 1 | COG1102 | Cytidylate kinase | MSM0734 |
| 1 | COG1328 | Oxygen-sensitive ribonucleoside-triphosphate reductase | MSM1383 |
| 1 | COG1437 | Adenylate cyclase, class 2 (thermophilic) | MSM0721 |
| 1 | COG1781 | Aspartate carbamoyltransferase, regulatory subunit | MSM0862 |
| 1 | COG1828 | Phosphoribosylformylglycinamidine (FGAM) synthase, PurS | MSM1548 |
| | | component | |
| 1 | COG1936 | Predicted nucleotide kinase (related to CMP and AMP kinases) | MSM0713 |
| 1 | COG2019 | Archaeal adenylate kinase | MSM0737 |
| 1 | COG2233 | Xanthine/uracil permeases | MSM0397 |
| 1 | COG3363 | Archaeal IMP cyclohydrolase | MSM0976 |

Coenzyme Transport and Metabolism (H)

| | | | |
|---|---|---|---|
| 1 | COG0001 | Glutamate-1-semialdehyde aminotransferase | MSM1233 |
| 1 | COG0007 | Uroporphyrinogen-III methylase | MSM1550 |
| 1 | COG0043 | 3-polyprenyl-4-hydroxybenzoate decarboxylase and related | MSM1286 |
| | | decarboxylases | |
| 1 | COG0054 | Riboflavin synthase beta-chain | MSM1296 |
| 1 | COG0108 | 3,4-dihydroxy-2-butanone 4-phosphate synthase | MSM1256 |
| 1 | COG0113 | Delta-aminolevulinic acid dehydratase | MSM1476 |
| 1 | COG0142 | Geranylgeranyl pyrophosphate synthase | MSM1443 |
| 1 | COG0157 | Nicotinate-nucleotide pyrophosphorylase | MSM0491 |
| 1 | COG0163 | 3-polyprenyl-4-hydroxybenzoate decarboxylase | MSM0237 |
| 1 | COG0171 | NAD synthase | MSM1171 |
| 1 | COG0181 | Porphobilinogen deaminase | MSM0881 |
| 1 | COG0237 | Dephospho-CoA kinase | MSM0141 |
| 1 | COG0294 | Dihydropteroate synthase and related enzymes | MSM0556 |
| 1 | COG0301 | Thiamine biosynthesis ATP pyrophosphatase | MSM0617 |
| 2 | COG0303 | Molybdopterin biosynthesis enzyme | MSM0950, MSM1343 |
| 1 | COG0311 | Predicted glutamine amidotransferase involved in pyridoxine | MSM0371 |
| | | biosynthesis | |
| 1 | COG0314 | Molybdopterin converting factor, large subunit | MSM0130 |
| 1 | COG0315 | Molybdenum cofactor biosynthesis enzyme | MSM1362 |
| 1 | COG0340 | Biotin-(acetyl-CoA carboxylase) ligase | MSM0766 |
| 1 | COG0351 | Hydroxymethylpyrimidine/phosphomethylpyrimidine kinase | MSM0289 |
| 1 | COG0352 | Thiamine monophosphate synthase | MSM0917 |
| 1 | COG0373 | Glutamyl-tRNA reductase | MSM0967 |
| 1 | COG0379 | Quinolinate synthase | MSM0494 |
| 1 | COG0382 | 4-hydroxybenzoate polyprenyltransferase and related | MSM0941 |
| | | prenyltransferases | |
| 1 | COG0407 | Uroporphyrinogen-III decarboxylase | MSM0518 |
| 2 | COG0422 | Thiamine biosynthesis protein ThiC | MSM0644, MSM1388 |
| 2 | COG0452 | Phosphopantothenoylcysteine synthetase/decarboxylase | MSM1048, MSM1049 |
| 1 | COG0476 | Dinucleotide-utilizing enzymes involved in molybdopterin and | MSM0729 |
| | | thiamine biosynthesis family 2 | |
| 1 | COG0499 | S-adenosylhomocysteine hydrolase | MSM0727 |
| 2 | COG0502 | Biotin synthase and related enzymes | MSM0573, MSM1099 |
| 1 | COG0521 | Molybdopterin biosynthesis enzymes | MSM0820 |
| 1 | COG0611 | Thiamine monophosphate kinase | MSM1283 |
| 1 | COG0684 | Demethylmenaquinone methyltransferase | MSM0426 |
| 1 | COG0720 | 6-pyruvoyl-tetrahydropterin synthase | MSM1056 |
| 1 | COG0746 | Molybdopterin-guanine dinucleotide biosynthesis protein A | MSM0240 |
| 1 | COG1010 | Precorrin-3B methylase | MSM1273 |
| 1 | COG1056 | Nicotinamide mononucleotide adenylyltransferase | MSM0129 |
| 1 | COG1270 | Cobalamin biosynthesis protein CobD/CbiB | MSM1266 |
| 2 | COG1429 | Cobalamin biosynthesis protein CobN and related Mg-chelatases | MSM1117, MSM1715 |
| 1 | COG1488 | Nicotinic acid phosphoribosyltransferase | MSM1792 |
| 2 | COG1492 | Cobyric acid synthase | MSM1254, MSM1565 |
| 2 | COG1541 | Coenzyme F390 synthetase | MSM0387, MSM1714 |
| 1 | COG1587 | Uroporphyrinogen-III synthase | MSM1504 |
| 1 | COG1648 | Siroheme synthase (precorrin-2 oxidase/ferrochelatase domain) | MSM0968 |
| 1 | COG1731 | Archaeal riboflavin synthase | MSM1622 |
| 1 | COG1763 | Molybdopterin-guanine dinucleotide biosynthesis protein | MSM1407 |
| 1 | COG1767 | Triphosphoribosyl-dephospho-CoA synthetase | MSM1477 |
| 1 | COG1797 | Cobyrinic acid a,c-diamide synthase | MSM1215 |
| 1 | COG1893 | Ketopantoate reductase | MSM0033 |
| 2 | COG1962 | Tetrahydromethanopterin S-methyltransferase, subunit H | MSM0627, MSM1007 |
| 1 | COG1985 | Pyrimidine reductase, riboflavin biosynthesis | MSM0065 |
| 1 | COG2038 | NaMN:DMB phosphoribosyltransferase | MSM1200 |
| 1 | COG2073 | Cobalamin biosynthesis protein CbiG | MSM1267 |
| 1 | COG2082 | Precorrin isomerase | MSM1234 |
| 1 | COG2099 | Precorrin-6x reductase | MSM0896 |
| 1 | COG2104 | Sulfur transfer protein involved in thiamine biosynthesis | MSM0552 |
| 1 | COG2145 | Hydroxyethylthiazole kinase, sugar kinase family | MSM0916 |
| 3 | COG2226 | Methylase involved in ubiquinone/menaquinone biosynthesis | MSM1448, MSM1558, MSM1564 |
| 1 | COG2241 | Precorrin-6B methylase 1 | MSM1167 |
| 1 | COG2242 | Precorrin-6B methylase 2 | MSM0238 |
| 1 | COG2243 | Precorrin-2 methylase | MSM1351 |
| 1 | COG2266 | GTP:adenosylcobinamide-phosphate guanylyltransferase | MSM1005 |
| 1 | COG2875 | Precorrin-4 methylase | MSM0101 |
| 1 | COG2896 | Molybdenum cofactor biosynthesis enzyme | MSM1406 |
| 1 | COG3161 | 4-hydroxybenzoate synthetase (chorismate lyase) | MSM0724 |
| 1 | COG3252 | Methenyltetrahydromethanopterin cyclohydrolase | MSM1723 |
| 2 | COG4054 | Methyl coenzyme M reductase, beta subunit | MSM0905, MSM1019 |
| 2 | COG4055 | Methyl coenzyme M reductase, subunit D | MSM0904, MSM1018 |
| 1 | COG4056 | Methyl coenzyme M reductase, subunit C | MSM1017 |
| 2 | COG4057 | Methyl coenzyme M reductase, gamma subunit | MSM0903, MSM1016 |
| 2 | COG4058 | Methyl coenzyme M reductase, alpha subunit | MSM0902, MSM1015 |
| 1 | COG4059 | Tetrahydromethanopterin S-methyltransferase, subunit E | MSM1014 |
| 1 | COG4060 | Tetrahydromethanopterin S-methyltransferase, subunit D | MSM1013 |
| 1 | COG4061 | Tetrahydromethanopterin S-methyltransferase, subunit C | MSM1012 |
| 1 | COG4062 | Tetrahydromethanopterin S-methyltransferase, subunit B | MSM1011 |
| 1 | COG4063 | Tetrahydromethanopterin S-methyltransferase, subunit A | MSM1010 |
| 1 | COG4064 | Tetrahydromethanopterin S-methyltransferase, subunit G | MSM1008 |
| 1 | COG4218 | Tetrahydromethanopterin S-methyltransferase, subunit F | MSM1009 |

Lipid Transport and Metabolism (I)

| | | | |
|---|---|---|---|
| 1 | COG0020 | Undecaprenyl pyrophosphate synthase | MSM0096 |
| 1 | COG0170 | Dolichol kinase | MSM0078 |
| 1 | COG0183 | Acetyl-CoA acetyltransferase | MSM1562 |
| 1 | COG0365 | Acyl-coenzyme A synthetases/AMP-(fatty) acid ligases | MSM0330 |
| 1 | COG0439 | Biotin carboxylase | MSM0765 |
| 2 | COG0558 | Phosphatidylglycerophosphate synthase | MSM0613, MSM1706 |
| 1 | COG0575 | CDP-diglyceride synthetase | MSM0850 |
| 1 | COG1183 | Phosphatidylserine synthase | MSM0982 |
| 2 | COG1211 | 4-diphosphocytidyl-2-methyl-D-erithritol synthase | MSM0377, MSM1542 |
| 1 | COG1250 | 3-hydroxyacyl-CoA dehydrogenase | MSM0965 |
| 1 | COG1257 | Hydroxymethylglutaryl-CoA reductase | MSM0227 |
| 1 | COG1260 | Myo-inositol-1-phosphate synthase | MSM0940 |
| 1 | COG1267 | Phosphatidylglycerophosphatase A and related proteins | MSM0934 |
| 1 | COG1577 | Mevalonate kinase | MSM1439 |
| 1 | COG1924 | Activator of 2-hydroxyglutaryl-CoA dehydratase (HSP70-class | MSM0810 |
| | | ATPase domain) | |
| 1 | COG2084 | | MSM0548 |
| 1 | COG3425 | 3-hydroxy-3-methylglutaryl CoA synthase | MSM1561 |

Inorganic Ion Transport and Metabolism (P)

| | | | |
|---|---|---|---|
| 1 | COG0003 | Oxyanion-translocating ATPase | MSM1170 |
| 1 | COG0004 | Ammonia permease | MSM0234 |
| 1 | COG0038 | Chloride channel protein EriC | MSM1721 |
| 1 | COG0053 | Predicted Co/Zn/Cd cation transporters | MSM0789 |
| 1 | COG0168 | Trk-type K+ transport systems, membrane components | MSM1095 |
| 1 | COG0226 | ABC-type phosphate transport system, periplasmic component | MSM0568 |
| 1 | COG0288 | Carbonic anhydrase | MSM1223 |
| 4 | COG0310 | ABC-type Co2+ transport system, permease component | MSM0583, MSM0584, MSM1488, |
| | | | MSM1618 |
| 1 | COG0370 | Fe2+ transport system protein B | MSM0589 |
| 1 | COG0474 | Cation transport ATPase | MSM0895 |
| 1 | COG0475 | Kef-type K+ transport systems, membrane components | MSM1186 |
| 1 | COG0530 | Ca2+/Na+ antiporter | MSM1027 |
| 1 | COG0569 | K+ transport systems, NAD-binding component | MSM1096 |
| 1 | COG0573 | ABC-type phosphate transport system, permease component | MSM0567 |
| 1 | COG0581 | ABC-type phosphate transport system, permease component | MSM0566 |
| 1 | COG0600 | ABC-type nitrate/sulfonate/bicarbonate transport system, permease | MSM0291 |
| | | component | |
| 1 | COG0609 | ABC-type Fe3+-siderophore transport system, permease | MSM1394 |
| | | component | |
| 1 | COG0614 | ABC-type Fe3+-hydroxamate transport system, periplasmic | MSM1393 |
| | | component | |
| 3 | COG0619 | ABC-type cobalt transport system, permease component CbiQ and | MSM0585, MSM0771, MSM1620 |
| | | related transporters | |
| 2 | COG0704 | Phosphate uptake regulator | MSM0564, MSM0569 |
| 1 | COG0715 | ABC-type nitrate/sulfonate/bicarbonate transport systems, | MSM1469 |
| | | periplasmic components | |
| 1 | COG0725 | ABC-type molybdate transport system, periplasmic component | MSM1609 |
| 1 | COG0798 | Arsenite efflux pump ACR3 and related permeases | MSM1078 |
| 1 | COG0855 | Polyphosphate kinase | MSM1424 |
| 1 | COG1006 | Multisubunit Na+/H+ antiporter, MnhC subunit | MSM1072 |
| 1 | COG1116 | ABC-type nitrate/sulfonate/bicarbonate transport system, ATPase | MSM0290 |
| | | component | |
| 1 | COG1117 | ABC-type phosphate transport system, ATPase component | MSM0565 |
| 1 | COG1118 | ABC-type sulfate/molybdate transport systems, ATPase component | MSM1611 |
| 2 | COG1122 | ABC-type cobalt transport system, ATPase component | MSM0586, MSM1621 |
| 1 | COG1230 | Co/Zn/Cd efflux system component | MSM1639 |
| 1 | COG1320 | Multisubunit Na+/H+ antiporter, MnhG subunit | MSM1074 |
| 1 | COG1348 | Nitrogenase subunit NifH (ATPase) | MSM1707 |
| 1 | COG1528 | Ferritin-like protein | MSM1712 |
| 1 | COG1563 | Predicted subunit of the Multisubunit Na+/H+ antiporter | MSM1073 |
| 1 | COG1824 | Permease, similar to cation transporters | MSM1275 |
| 1 | COG1863 | Multisubunit Na+/H+ antiporter, MnhE subunit | MSM1076 |
| 1 | COG1918 | Fe2+ transport system protein A | MSM0588 |
| 1 | COG1930 | ABC-type cobalt transport system, periplasmic component | MSM1619 |
| 2 | COG2111 | Multisubunit Na+/H+ antiporter, MnhB subunit | MSM1068, MSM1069 |
| 1 | COG2116 | Formate/nitrite family of transporters | MSM1403 |
| 1 | COG2212 | Multisubunit Na+/H+ antiporter, MnhF subunit | MSM1075 |
| 4 | COG2217 | Cation transport ATPase | MSM0293, MSM0960, MSM1127, |
| | | | MSM1153 |
| 1 | COG2608 | Copper chaperone | MSM0961 |
| 1 | COG3263 | NhaP-type Na+/H+ and K+/H+ antiporters with a unique C-terminal | MSM0618 |
| | | domain | |
| 1 | COG3420 | Nitrous oxidase accessory protein | MSM1397 |
| 1 | COG4149 | ABC-type molybdate transport system, permease component | MSM1610 |

Secondary Metabolites Biosynthesis, Transport and Catabolism (Q)

| | | | |
|---|---|---|---|
| 1 | COG1228 | Imidazolonepropionase and related amidohydrolases | MSM1154 |

General Function Prediction Only (R)

| | | | |
|---|---|---|---|
| 2 | COG0110 | Acetyltransferase (isoleucine patch superfamily) | MSM0189, MSM1600 |
| 2 | COG0312 | Predicted Zn-dependent proteases and their inactivated homologs | MSM0866, MSM0947 |
| 1 | COG0375 | Zn finger protein HypA/HybF (possibly regulating hydrogenase | MSM0108 |
| | | expression) | |
| 1 | COG0388 | Predicted amidohydrolase | MSM0500 |
| 1 | COG0433 | Predicted ATPase | MSM0122 |
| 1 | COG0446 | Uncharacterized NAD(FAD)-dependent dehydrogenases | MSM0046 |
| 2 | COG0456 | Acetyltransferases | MSM0893, MSM1104 |
| 11 | COG0457 | FOG: TPR repeat | MSM0530, MSM0651, MSM0914, |
| | | | MSM1449, MSM1451, MSM1740, |
| | | | MSM1766, MSM1776, MSM1786, |
| | | | MSM1787, MSM1788 |
| 2 | COG0491 | Zn-dependent hydrolases, including glyoxylases | MSM0421, MSM1097 |
| 1 | COG0496 | Predicted acid phosphatase | MSM1218 |
| 2 | COG0517 | FOG: CBS domain | MSM0175, MSM1102 |
| 4 | COG0535 | Predicted Fe—S oxidoreductases | MSM0663, MSM0808, MSM1301, |
| | | | MSM1497 |
| 1 | COG0561 | Predicted hydrolases of the HAD superfamily | MSM0946 |
| 1 | COG0595 | Predicted hydrolase of the metallo-beta-lactamase superfamily | MSM1442 |
| 1 | COG0603 | Predicted PP-loop superfamily ATPase | MSM0936 |
| 1 | COG0613 | Predicted metal-dependent phosphoesterases (PHP family) | MSM1244 |
| 1 | COG0622 | Predicted phosphoesterase | MSM0507 |
| 1 | COG0627 | Predicted esterase | MSM0149 |
| 1 | COG0628 | Predicted permease | MSM1042 |
| 1 | COG0641 | Arylsulfatase regulator (Fe—S oxidoreductase) | MSM1606 |
| 5 | COG0655 | Multimeric flavodoxin WrbA | MSM0267, MSM0664, MSM0923, |
| | | | MSM1209, MSM1727 |
| 1 | COG0661 | Predicted unusual protein kinase | MSM0525 |
| 1 | COG0663 | Carbonic anhydrases/acetyltransferases, isoleucine patch | MSM0654 |
| | | superfamily | |
| 1 | COG0666 | FOG: Ankyrin repeat | MSM0266 |
| 1 | COG0673 | Predicted dehydrogenases and related proteins | MSM0882 |
| 1 | COG0679 | Predicted permeases | MSM1334 |
| 1 | COG0714 | MoxR-like ATPases | MSM0555 |
| 1 | COG0730 | Predicted permeases | MSM0420 |
| 3 | COG0733 | Na+-dependent transporters of the SNF family | MSM0699, MSM1531, MSM1532 |
| 1 | COG0824 | Predicted thioesterase | MSM0133 |
| 1 | COG1011 | Predicted hydrolase (HAD superfamily) | MSM1480 |
| 1 | COG1019 | Predicted nucleotidyltransferase | MSM0785 |
| 1 | COG1078 | HD superfamily phosphohydrolases | MSM0236 |
| 1 | COG1084 | Predicted GTPase | MSM0869 |
| 1 | COG1094 | Predicted RNA-binding protein (contains KH domains) | MSM0954 |
| 1 | COG1099 | Predicted metal-dependent hydrolases with the TIM-barrel fold | MSM0405 |
| 3 | COG1123 | ATPase components of various ABC-type transport systems, | MSM0770, MSM0971, MSM1698 |
| | | contain duplicated ATPase | |
| 2 | COG1163 | Predicted GTPase | MSM0714, MSM0715 |
| 1 | COG1201 | Lhr-like helicases | MSM0502 |
| 1 | COG1202 | Superfamily II helicase, archaea-specific | MSM1583 |
| 1 | COG1203 | Predicted helicases | MSM0166 |
| 1 | COG1204 | Superfamily II helicase | MSM0839 |
| 1 | COG1205 | Distinct helicase family with a unique C-terminal domain including a | MSM0112 |
| | | metal-binding cysteine cluster | |
| 5 | COG1216 | Predicted glycosyltransferases | MSM1321, MSM1329, MSM1330, |
| | | | MSM1503, MSM1507 |
| 1 | COG1223 | Predicted ATPase (AAA+ superfamily) | MSM0966 |
| 1 | COG1234 | Metal-dependent hydrolases of the beta-lactamase superfamily III | MSM0492 |
| 1 | COG1235 | Metal-dependent hydrolases of the beta-lactamase superfamily I | MSM1473 |
| 1 | COG1244 | Predicted Fe—S oxidoreductase | MSM0544 |
| 1 | COG1245 | Predicted ATPase, RNase L inhibitor (RLI) homolog | MSM0607 |
| 1 | COG1253 | Hemolysins and related proteins containing CBS domains | MSM1026 |
| 4 | COG1266 | Predicted metal-dependent membrane protease | MSM0292, MSM0803, MSM1148, |
| | | | MSM1180 |
| 1 | COG1268 | Uncharacterized conserved protein | MSM0429 |
| 2 | COG1277 | ABC-type transport system involved in multi-copper enzyme | MSM0594, MSM0595 |
| | | maturation, permease component | |
| 1 | COG1287 | Uncharacterized membrane protein, required for N-linked | MSM0716 |
| | | glycosylation | |
| 1 | COG1310 | Predicted metal-dependent protease of the PAD1/JAB1 | MSM0462 |
| | | superfamily | |
| 2 | COG1323 | Predicted nucleotidyltransferase | MSM0547, MSM0994 |
| 1 | COG1326 | Uncharacterized archaeal Zn-finger protein | MSM0846 |
| 2 | COG1342 | Predicted DNA-binding proteins | MSM0207, MSM0208 |
| 1 | COG1350 | Predicted alternative tryptophan synthase beta-subunit (paralog of | MSM1242 |
| | | TrpB) | |
| 1 | COG1355 | Predicted dioxygenase | MSM1438 |
| 1 | COG1365 | Predicted ATPase (PP-loop superfamily) | MSM0190 |
| 9 | COG1373 | Predicted ATPase (AAA+ superfamily) | MSM0061, MSM0280, MSM0680, |
| | | | MSM1197, MSM1278, MSM1527, |
| | | | MSM1789, MSM1790, MSM1795 |
| 1 | COG1402 | Uncharacterized protein, putative amidase | MSM0184 |
| 2 | COG1408 | Predicted phosphohydrolases | MSM0964, MSM1165 |
| 1 | COG1409 | Predicted phosphohydrolases | MSM0383 |
| 1 | COG1411 | Uncharacterized protein related to proFAR isomerase (HisA) | MSM1636 |
| 1 | COG1412 | Uncharacterized proteins of PilT N-term./Vapc superfamily | MSM0199 |
| 1 | COG1418 | Predicted HD superfamily hydrolase | MSM0632 |
| 1 | COG1439 | Predicted nucleic acid-binding protein, consists of a PIN domain | MSM0816 |
| | | and a Znribbon module | |
| 4 | COG1453 | Predicted oxidoreductases of the aldo/keto reductase family | MSM0148, MSM0728, MSM1450, |
| | | | MSM1608 |
| 1 | COG1489 | DNA-binding protein, stimulates sugar fermentation | MSM1090 |
| 1 | COG1537 | Predicted RNA-binding proteins | MSM0640 |
| 1 | COG1545 | Predicted nucleic-acid-binding protein containing a Zn-ribbon | MSM1279 |
| 2 | COG1571 | Predicted DNA-binding protein containing a Zn-ribbon domain | MSM0452, MSM1295 |
| 1 | COG1606 | ATP-utilizing enzymes of the PP-loop superfamily | MSM0482 |
| 1 | COG1608 | Predicted archaeal kinase | MSM1440 |
| 1 | COG1611 | Predicted Rossmann fold nucleotide-binding protein | MSM0004 |
| 1 | COG1634 | Uncharacterized Rossmann fold enzyme | MSM0672 |
| 1 | COG1646 | Predicted phosphate-binding enzymes, TIM-barrel fold | MSM0124 |
| 2 | COG1672 | Predicted ATPase (AAA+ superfamily) | MSM1196, MSM1646 |
| 1 | COG1691 | NCAIR mutase (PurE)-related proteins | MSM1105 |
| 1 | COG1707 | ACT domain-containing protein | MSM1060 |
| 1 | COG1759 | ATP-utilizing enzymes of ATP-grasp superfamily (probably | MSM0506 |
| | | carboligases) | |
| 1 | COG1779 | C4-type Zn-finger protein | MSM0409 |
| 1 | COG1782 | Predicted metal-dependent RNase, consists of a metallo-beta- | MSM1038 |
| | | lactamase domain and an RNA-binding KH domain | |
| 1 | COG1821 | Predicted ATP-utilizing enzyme (ATP-grasp superfamily) | MSM0852 |
| 1 | COG1829 | Predicted archaeal kinase (sugar kinase superfamily) | MSM0060 |
| 1 | COG1855 | ATPase (PilT family) | MSM1183 |
| 1 | COG1878 | Predicted metal-dependent hydrolase | MSM0827 |
| 1 | COG1907 | Predicted archaeal sugar kinases | MSM0848 |
| 1 | COG1942 | Uncharacterized protein, 4-oxalocrotonate tautomerase homolog | MSM0688 |
| 1 | COG1964 | Predicted Fe—S oxidoreductases | MSM0849 |
| 1 | COG1988 | Predicted membrane-bound metal-dependent hydrolases | MSM1079 |
| 1 | COG1994 | Zn-dependent proteases | MSM0479 |
| 2 | COG2005 | N-terminal domain of molybdenum-binding protein | MSM0131, MSM1207 |
| 1 | COG2047 | Uncharacterized protein (ATP-grasp superfamily) | MSM1131 |
| 1 | COG2054 | Uncharacterized archaeal kinase related to aspartokinases, | MSM0604 |
| | | uridylate kinases | |
| 1 | COG2068 | Uncharacterized MobA-related protein | MSM0116 |
| 1 | COG2079 | Uncharacterized protein involved in propionate catabolism | MSM0449 |
| 1 | COG2081 | Predicted flavoproteins | MSM1235 |
| 1 | COG2085 | Predicted dinucleotide-binding enzymes | MSM0049 |
| 1 | COG2102 | Predicted ATPases of PP-loop superfamily | MSM0142 |
| 1 | COG2118 | DNA-binding protein | MSM0708 |
| 1 | COG2129 | Predicted phosphoesterases, related to the lcc protein | MSM0792 |
| 1 | COG2150 | Predicted regulator of amino acid metabolism, contains ACT | MSM0635 |
| | | domain | |
| 1 | COG2151 | Predicted metal-sulfur cluster biosynthetic enzyme | MSM0634 |
| 1 | COG2220 | Predicted Zn-dependent hydrolases of the beta-lactamase fold | MSM0779 |
| 1 | COG2232 | Predicted ATP-dependent carboligase related to biotin carboxylase | MSM0431 |
| 3 | COG2244 | Membrane protein involved in the export of O-antigen and teichoic | MSM1208, MSM1559, MSM1560 |
| | | acid | |
| 1 | COG2252 | Permeases | MSM1736 |
| 1 | COG2403 | Predicted GTPase | MSM0091 |
| 1 | COG2405 | Predicted nucleic acid-binding protein, contains PIN domain | MSM1530 |
| 1 | COG2517 | Predicted RNA-binding protein containing a C-terminal EMAP | MSM0466 |
| | | domain | |
| 2 | COG2520 | Predicted methyltransferase | MSM0802, MSM1036 |
| 1 | COG2522 | Predicted transcriptional regulator | MSM0269 |
| 3 | COG3291 | FOG: PKD repeat | MSM0281, MSM1716, MSM1735 |
| 1 | COG3442 | Predicted glutamine amidotransferase | MSM1138 |
| 1 | COG3552 | Protein containing von Willebrand factor type A (vWA) domain | MSM0554 |
| 1 | COG3608 | Predicted deacylase | MSM1080 |
| 1 | COG3894 | Uncharacterized metal-binding protein | MSM0517 |
| 1 | COG3942 | Surface antigen | MSM0921 |
| 1 | COG3943 | Virulence protein | MSM1645 |
| 1 | COG4002 | Predicted phosphotransacetylase | MSM0095 |
| 1 | COG4015 | Predicted dinucleotide-utilizing enzyme of the ThiF/HesA family | MSM0577 |
| 1 | COG4026 | Uncharacterized protein containing TOPRIM domain, potential | MSM1703 |
| | | nuclease | |
| 2 | COG4032 | Predicted thiamine-pyrophosphate-binding protein | MSM0080, MSM0081 |
| 1 | COG4052 | Uncharacterized protein related to methyl coenzyme M reductase | MSM1021 |
| | | subunit C | |
| 1 | COG4076 | Predicted RNA methylase | MSM0363 |
| 1 | COG4085 | Predicted RNA-binding protein, contains TRAM domain | MSM0647 |
| 1 | COG4087 | Soluble P-type ATPase | MSM1252 |
| 1 | COG4277 | Predicted DNA-binding protein with the Helix-hairpin-helix motif | MSM1239 |
| 2 | COG4747 | ACT domain-containing protein | MSM0388, MSM1713 |
| 1 | COG4801 | Predicted acyltransferase | MSM1385 |
| 1 | COG4827 | Predicted transporter | MSM1717 |
| 1 | COG5012 | Predicted cobalamin binding protein | MSM0516 |
| 3 | COG5271 | AAA ATPase containing von Willebrand factor type A (vWA) | MSM0993, MSM1240, MSM1454 |
| | | domain | |
| 1 | COG5362 | Phage-related terminase | MSM1671 |
| 1 | COG5518 | Bacteriophage capsid portal protein | MSM1672 |
| 2 | COG5643 | Protein containing a metal-binding domain shared with | MSM1489, MSM1491 |
| | | formylmethanofuran dehydrogenase subunit E | |

Function Unknown (S)

| | | | |
|---|---|---|---|
| 1 | COG0011 | Uncharacterized conserved protein | MSM1029 |
| 2 | COG0028 | | MSM0686, MSM1225 |
| 1 | COG0059 | | MSM1222 |
| 1 | COG0111 | | MSM0457 |
| 1 | COG0147 | | MSM1146 |
| 1 | COG0248 | | MSM1423 |
| 2 | COG0318 | | MSM0025, MSM0374 |
| 1 | COG0327 | Uncharacterized conserved protein | MSM0576 |
| 1 | COG0378 | | MSM0107 |
| 1 | COG0391 | Uncharacterized conserved protein | MSM0974 |
| 1 | COG0392 | Predicted integral membrane protein | MSM1094 |
| 2 | COG0393 | Uncharacterized conserved protein | MSM0418, MSM0456 |
| 1 | COG0432 | Uncharacterized conserved protein | MSM0279 |
| 1 | COG0444 | | MSM0303 |
| 1 | COG0451 | | MSM0327 |
| 2 | COG0458 | | MSM0361, MSM0488 |
| 1 | COG0462 | | MSM1577 |
| 2 | COG0473 | | MSM0373, MSM1298 |
| 2 | COG0477 | | MSM0772, MSM1210 |
| 2 | COG0500 | | MSM0028, MSM1510 |
| 1 | COG0505 | | MSM0489 |
| 1 | COG0512 | | MSM1145 |
| 1 | COG0513 | | MSM1498 |
| 1 | COG0543 | | MSM1043 |
| 1 | COG0585 | Uncharacterized conserved protein | MSM1156 |
| 1 | COG0591 | | MSM0386 |
| 1 | COG0599 | Uncharacterized homolog of gamma-carboxymuconolactone | MSM0296 |
| | | decarboxylase subunit | |
| 1 | COG0601 | | MSM0301 |
| 2 | COG0615 | | MSM0859, MSM1514 |
| 1 | COG1028 | | MSM1731 |
| 2 | COG1061 | | MSM0690, MSM0695 |
| 1 | COG1063 | | MSM0376 |
| 1 | COG1086 | | MSM1535 |
| 1 | COG1120 | | MSM1395 |
| 1 | COG1124 | | MSM0304 |
| 2 | COG1134 | | MSM1326, MSM1592 |
| 1 | COG1173 | | MSM0302 |
| 1 | COG1199 | | MSM1352 |
| 1 | COG1208 | | MSM0655 |
| 1 | COG1243 | | MSM0842 |
| 1 | COG1255 | Uncharacterized protein conserved in archaea | MSM0894 |
| 2 | COG1300 | Uncharacterized membrane protein | MSM0215, MSM1526 |
| 1 | COG1303 | Uncharacterized protein conserved in archaea | MSM0932 |
| 1 | COG1339 | | MSM1257 |
| 1 | COG1359 | Uncharacterized conserved protein | MSM1378 |
| 1 | COG1371 | Uncharacterized conserved protein | MSM0668 |
| 1 | COG1379 | Uncharacterized conserved protein | MSM1129 |
| 1 | COG1387 | | MSM0063 |
| 1 | COG1415 | Uncharacterized conserved protein | MSM0931 |
| 1 | COG1422 | Predicted membrane protein | MSM0736 |
| 1 | COG1430 | Uncharacterized conserved protein | MSM1339 |
| 1 | COG1460 | Uncharacterized protein conserved in archaea | MSM1376 |
| 1 | COG1469 | Uncharacterized conserved protein | MSM1033 |
| 2 | COG1474 | | MSM0671, MSM1264 |
| 1 | COG1478 | Uncharacterized conserved protein | MSM0975 |
| 1 | COG1511 | Predicted membrane protein | MSM0093 |
| 2 | COG1520 | FOG: WD40-like repeat | MSM1247, MSM1567 |
| 1 | COG1548 | | MSM0851 |
| 1 | COG1578 | Uncharacterized conserved protein | MSM0551 |
| 1 | COG1602 | Uncharacterized conserved protein | MSM0346 |
| 2 | COG1617 | Uncharacterized conserved protein | MSM0348, MSM0349 |
| 1 | COG1627 | Uncharacterized protein conserved in archaea | MSM0983 |
| 1 | COG1630 | Uncharacterized protein conserved in archaea | MSM0123 |
| 1 | COG1641 | Uncharacterized conserved protein | MSM0935 |
| 1 | COG1665 | Uncharacterized protein conserved in archaea | MSM1058 |
| 1 | COG1679 | Uncharacterized conserved protein | MSM1192 |
| 1 | COG1685 | | MSM0835 |
| 1 | COG1690 | Uncharacterized conserved protein | MSM0666 |
| 1 | COG1693 | Uncharacterized protein conserved in archaea | MSM1417 |
| 1 | COG1698 | Uncharacterized protein conserved in archaea | MSM1268 |
| 1 | COG1701 | Uncharacterized protein conserved in archaea | MSM0140 |
| 2 | COG1704 | Uncharacterized conserved protein | MSM0660, MSM1422 |
| 1 | COG1710 | Uncharacterized protein conserved in archaea | MSM0069 |
| 1 | COG1711 | Uncharacterized protein conserved in archaea | MSM1136 |
| 1 | COG1714 | Predicted membrane protein/domain | MSM1493 |
| 1 | COG1718 | | MSM0952 |
| 1 | COG1720 | Uncharacterized conserved protein | MSM0132 |
| 2 | COG1738 | Uncharacterized conserved protein | MSM0646, MSM1382 |
| 1 | COG1739 | Uncharacterized conserved protein | MSM0186 |
| 1 | COG1751 | Uncharacterized conserved protein | MSM0628 |
| 1 | COG1771 | Uncharacterized protein conserved in archaea | MSM0070 |
| 1 | COG1784 | Predicted membrane protein | MSM0599 |
| 1 | COG1786 | Uncharacterized conserved protein | MSM1155 |
| 1 | COG1795 | Uncharacterized conserved protein | MSM1213 |
| 1 | COG1809 | Uncharacterized conserved protein | MSM0086 |
| 1 | COG1817 | Uncharacterized protein conserved in archaea | MSM0106 |
| 2 | COG1822 | Predicted archaeal membrane protein | MSM0581, MSM1216 |
| 1 | COG1836 | Predicted membrane protein | MSM0659 |
| 1 | COG1844 | Uncharacterized protein conserved in archaea | MSM0356 |
| 1 | COG1849 | Uncharacterized protein conserved in archaea | MSM0614 |
| 2 | COG1852 | Uncharacterized conserved protein | MSM0225, MSM0649 |
| 1 | COG1860 | Uncharacterized protein conserved in archaea | MSM0285 |
| 1 | COG1865 | Uncharacterized conserved protein | MSM0825 |
| 1 | COG1872 | Uncharacterized conserved protein | MSM1603 |
| 4 | COG1873 | Uncharacterized conserved protein | MSM0465, MSM0822, MSM0841, |
| | | | MSM1004 |
| 1 | COG1891 | Uncharacterized protein conserved in archaea | MSM1628 |
| 1 | COG1909 | Uncharacterized protein conserved in archaea | MSM0195 |
| 1 | COG1915 | Uncharacterized conserved protein | MSM0875 |
| 1 | COG1916 | Uncharacterized homolog of PrgY (pheromone shutdown protein) | MSM1024 |
| 1 | COG1917 | Uncharacterized conserved protein, contains double-stranded | MSM1447 |
| | | beta-helix domain | |
| 1 | COG1920 | Uncharacterized conserved protein | MSM0288 |
| 1 | COG1937 | Uncharacterized protein conserved in bacteria | MSM0959 |
| 1 | COG1944 | Uncharacterized conserved protein | MSM0480 |
| 1 | COG1945 | Uncharacterized conserved protein | MSM0878 |
| 1 | COG1950 | Predicted membrane protein | MSM1166 |
| 1 | COG1971 | Predicted membrane protein | MSM0030 |
| 1 | COG1990 | Uncharacterized conserved protein | MSM0605 |
| 1 | COG1991 | Uncharacterized conserved protein | MSM0145 |
| 1 | COG2029 | Uncharacterized conserved protein | MSM1057 |
| 1 | COG2035 | Predicted membrane protein | MSM1582 |
| 1 | COG2042 | Uncharacterized conserved protein | MSM0126 |
| 1 | COG2043 | Uncharacterized protein conserved in archaea | MSM0115 |
| 1 | COG2078 | Uncharacterized conserved protein | MSM0867 |
| 1 | COG2090 | Uncharacterized protein conserved in archaea | MSM1591 |
| 1 | COG2098 | Uncharacterized protein conserved in archaea | MSM0985 |
| 1 | COG2106 | Uncharacterized conserved protein | MSM0763 |
| 1 | COG2122 | Uncharacterized conserved protein | MSM0088 |
| 1 | COG2136 | | MSM1632 |
| 2 | COG2138 | Uncharacterized conserved protein | MSM1280, MSM1281 |
| 1 | COG2246 | Predicted membrane protein | MSM1289 |
| 2 | COG2314 | Predicted membrane protein | MSM0109, MSM1739 |
| 2 | COG2364 | Predicted membrane protein | MSM0673, MSM0676 |
| 1 | COG2429 | Uncharacterized conserved protein | MSM0973 |
| 1 | COG2450 | Uncharacterized conserved protein | MSM0406 |
| 1 | COG2456 | Uncharacterized conserved protein | MSM1624 |
| 1 | COG2457 | Uncharacterized conserved protein | MSM0873 |
| 1 | COG2892 | Uncharacterized protein conserved in archaea | MSM1633 |
| 1 | COG3273 | Uncharacterized conserved protein | MSM1274 |
| 2 | COG3274 | Uncharacterized protein conserved in bacteria | MSM1370, MSM1556 |
| 1 | COG3356 | Predicted membrane protein | MSM0776 |
| 1 | COG3367 | Uncharacterized conserved protein | MSM0407 |
| 1 | COG3482 | Uncharacterized conserved protein | MSM0481 |
| 1 | COG3543 | Uncharacterized conserved protein | MSM0430 |
| 3 | COG3548 | Predicted integral membrane protein | MSM0468, MSM0469, MSM1205 |
| 1 | COG3586 | Uncharacterized conserved protein | MSM1741 |
| 1 | COG3815 | Predicted membrane protein | MSM1770 |
| 1 | COG3874 | Uncharacterized conserved protein | MSM0683 |
| 1 | COG3976 | Uncharacterized protein conserved in bacteria | MSM1637 |
| 1 | COG4009 | Uncharacterized protein conserved in archaea | MSM0794 |
| 1 | COG4010 | Uncharacterized protein conserved in archaea | MSM0793 |
| 1 | COG4012 | Uncharacterized protein conserved in archaea | MSM1243 |
| 1 | COG4014 | Uncharacterized protein conserved in archaea | MSM0840 |
| 1 | COG4016 | Uncharacterized protein conserved in archaea | MSM0578 |
| 1 | COG4017 | Uncharacterized protein conserved in archaea | MSM0575 |
| 1 | COG4018 | Uncharacterized protein conserved in archaea | MSM0571 |
| 1 | COG4019 | Uncharacterized protein conserved in archaea | MSM0574 |
| 1 | COG4020 | Uncharacterized protein conserved in archaea | MSM1221 |
| 1 | COG4021 | Uncharacterized conserved protein | MSM0463 |
| 1 | COG4022 | Uncharacterized protein conserved in archaea | MSM0643 |
| 1 | COG4029 | Uncharacterized protein conserved in archaea | MSM0812 |
| 1 | COG4030 | Uncharacterized protein conserved in archaea | MSM0309 |
| 1 | COG4033 | Uncharacterized protein conserved in archaea | MSM0103 |
| 1 | COG4035 | Predicted membrane protein | MSM0315 |
| 1 | COG4036 | Predicted membrane protein | MSM0320 |
| 1 | COG4037 | Predicted membrane protein | MSM0321 |
| 1 | COG4038 | Predicted membrane protein | MSM0322 |
| 1 | COG4039 | Predicted membrane protein | MSM0323 |
| 1 | COG4040 | Predicted membrane protein | MSM0324 |
| 1 | COG4041 | Predicted membrane protein | MSM0325 |
| 1 | COG4042 | Predicted membrane protein | MSM0326 |
| 2 | COG4050 | Uncharacterized protein conserved in archaea | MSM0811, MSM1130 |
| 1 | COG4051 | Uncharacterized protein conserved in archaea | MSM0809 |
| 1 | COG4053 | Uncharacterized protein conserved in archaea | MSM0229 |
| 1 | COG4065 | Uncharacterized protein conserved in archaea | MSM1006 |
| 2 | COG4066 | Uncharacterized protein conserved in archaea | MSM0064, MSM0367 |
| 1 | COG4068 | Uncharacterized protein containing a Zn-ribbon | MSM0417 |
| 1 | COG4069 | Uncharacterized protein conserved in archaea | MSM0815 |
| 1 | COG4071 | Uncharacterized protein conserved in archaea | MSM0630 |
| 1 | COG4073 | Uncharacterized protein conserved in archaea | MSM0726 |
| 1 | COG4077 | Uncharacterized protein conserved in archaea | MSM1034 |
| 1 | COG4078 | Predicted membrane protein | MSM0319 |
| 1 | COG4079 | Uncharacterized protein conserved in archaea | MSM1472 |
| 1 | COG4081 | Uncharacterized protein conserved in archaea | MSM0104 |
| 1 | COG4084 | Uncharacterized protein conserved in archaea | MSM0314 |
| 1 | COG4121 | Uncharacterized conserved protein | MSM1555 |
| 1 | COG4289 | Uncharacterized protein conserved in bacteria | MSM1302 |
| 1 | COG4635 | | MSM1262 |
| 3 | COG4713 | Predicted membrane protein | MSM0521, MSM1291, MSM1444 |
| 2 | COG4744 | Uncharacterized conserved protein | MSM1402, MSM1719 |
| 1 | COG4883 | Uncharacterized protein conserved in archaea | MSM1086 |
| 1 | COG4907 | Predicted membrane protein | MSM1421 |
| 1 | COG5015 | Uncharacterized conserved protein | MSM0863 |
| 1 | COG5305 | Predicted membrane protein | MSM1288 |
| 1 | COG5423 | Predicted metal-binding protein | MSM0050 |
| 1 | COG5440 | Uncharacterized conserved protein | MSM1265 |
| 4 | COG5464 | Uncharacterized conserved protein | MSM0067, MSM0681, MSM1765, |
| | | | MSM1785 |

TABLE 10
Glycosyltransferases (GT) in M. smithii and M. stadtmanae proteomes
classified according to Carbohydrate Active enZyme (CAZy) database
CAZy GT family Protein Annotation

| | | | |
|---|---|---|---|
| M. smithii | GT1 | MSM0423* | glycosyltransferase (modular protein with two domains distantly related to |
| | | | glycosyltransferases), GT2/GT1 families [CAZy] |
| | GT2 | MSM0423* | glycosyltransferase (modular protein with two domains distantly related to |
| | | | glycosyltransferases), GT2/GT1 families [CAZy] |
| | | MSM1290 | glycosyltransferase (related to beta-glycosyltransferases), GT2 family |
| | | | [CAZy] |
| | | MSM1294 | glycosyltransferase (related to beta-glycosyltransferases), GT2 family |
| | | | [CAZy] |
| | | MSM1297 | glycosyltransferase (related to beta-glycosyltransferases), GT2 family |
| | | | [CAZy] |
| | | MSM1310 | glycosyltransferase (related to beta-glycosyltransferases), GT2 family |
| | | | [CAZy] |
| | | MSM1311 | glycosyltransferase (related to beta-glycosyltransferases), GT2 family |
| | | | [CAZy] |
| | | MSM1312 | glycosyltransferase (related to beta-glycosyltransferases), GT2 family |
| | | | [CAZy] |
| | | MSM1316 | glycosyltransferase (related to beta-glycosyltransferases), GT2 family |
| | | | [CAZy] |
| | | MSM1321 | glycosyltransferase (related to beta-glycosyltransferases), GT2 family |
| | | | [CAZy] |
| | | MSM1323 | glycosyltransferase (related to beta-glycosyltransferases), GT2 family |
| | | | [CAZy] |
| | | MSM1324 | glycosyltransferase (related to beta-glycosyltransferases), GT2 family |
| | | | [CAZy] |
| | | MSM1328 | glycosyltransferase (related to beta-glycosyltransferases), GT2 family |
| | | | [CAZy] |
| | | MSM1329 | glycosyltransferase (related to beta-glycosyltransferases), GT2 family |
| | | | [CAZy] |
| | | MSM1330 | glycosyltransferase (related to beta-glycosyltransferases), GT2 family |
| | | | [CAZy] |
| | | MSM1503 | glycosyltransferase (related to beta-glycosyltransferases), GT2 family |
| | | | [CAZy] |
| | | MSM1507 | glycosyltransferase (related to beta-glycosyltransferases), GT2 family |
| | | | [CAZy] |
| | | MSM1545 | glycosyltransferase (related to beta-glycosyltransferases), GT2 family |
| | | | [CAZy] |
| | | MSM1594 | glycosyltransferase (modular protein with two N-terminal beta- |
| | | | glycosyltransferaserelated domains and C-terminal |
| | | | glycerophosphotransferase-related domain), GT2 families [CAZy] |
| | | MSM1602 | glycosyltransferase (modular protein with N-terminal beta- |
| | | | glycosyltransferase-related domain and C-terminal |
| | | | glycerophosphotransferase-related domain), GT2 family [CAZy] |
| | | MSM1623 | glycosyltransferase (related to beta-glycosyltransferases), GT2 family |
| | | | [CAZy] |
| | | MSM1627 | glycosyltransferase (related to bactoprenol beta-glucosyltransferase), GT2 |
| | | | family [CAZy] |
| | GT4 | MSM0836 | related to alpha-glycosyltransferases, GT4 family [CAZy] |
| | | MSM1313 | distantly related to glycosyltransferases, GT4 family [CAZy] |
| | | MSM1317 | distantly related to glycosyltransferases, GT4 family [CAZy] |
| | | MSM1322 | distantly related to alpha-glycosyltransferases, GT4 family [CAZy] |
| | GT66 | MSM0716 | glycosyltransferase (distantly related to oligosaccharyltransferases), STT3 |
| | | | subunit, GT66 family [CAZy] |
| M. stadtmanae | GT1 | Msp_0515 | partially conserved hypothetical protein |
| | | Msp_0645 | predicted glycosyltransferase |
| | GT2 | Msp_0042** | predicted glycosyltransferase |
| | | Msp_0045 | predicted glycosyltransferase |
| | | Msp_0054 | predicted glycosyltransferase |
| | | Msp_0203 | predicted glycosyltransferase |
| | | Msp_0206 | predicted glycosyltransferase |
| | | Msp_0207 | predicted glycosyltransferase |
| | | Msp_0212 | predicted glycosyltransferase |
| | | Msp_0215 | predicted glycosyltransferase |
| | | Msp_0218 | predicted glycosyltransferase |
| | | Msp_0220 | predicted glycosyltransferase |
| | | Msp_0441 | predicted glycosyltransferase |
| | | Msp_0442 | predicted glycosyltransferase |
| | | Msp_0492 | predicted glycosyltransferase |
| | | Msp_0493 | predicted glycosyltransferase |
| | | Msp_0495 | predicted glycosyltransferase |
| | | Msp_0496 | predicted glycosyltransferase |
| | | Msp_0500 | predicted glycosyltransferase |
| | | Msp_0538 | predicted glycosyltransferase |
| | | Msp_0541 | predicted glycosyltransferase |
| | | Msp_0645 | predicted glycosyltransferase |
| | | Msp_0989 | predicted glycosyltransferase |
| | | Msp_1087 | predicted glycosyltransferase |
| | | Msp_1481 | conserved hypothetical membrane-spanning protein |
| | | Msp_1540 | partially conserved hypothetical protein |
| | GT4 | Msp_0039 | predicted glycosyltransferase |
| | | Msp_0044 | predicted glycosyltransferase |
| | | Msp_0049 | predicted glycosyltransferase |
| | | Msp_0051 | predicted glycosyltransferase |
| | | Msp_0052 | predicted glycosyltransferase |
| | | Msp_0053 | predicted glycosyltransferase |
| | | Msp_0055 | predicted glycosyltransferase |
| | | Msp_0056 | predicted glycosyltransferase |
| | | Msp_0057 | predicted glycosyltransferase |
| | | Msp_0101 | predicted glycosyltransferase |
| | | Msp_0492 | predicted glycosyltransferase |
| | | Msp_0991 | predicted glycosyltransferase |
| | GT66 | Msp_0368 | conserved hypothetical membrane-spanning protein |

*modular protein
**probable fragment

TABLE 11
qRT-PCR analyses of M. smithii transcription in vivo in
the presence or absence of B. thetaiotaomicron VPI-5482

| | | | | |
|---|---|---|---|---|
| | | Fold | | P- |
| Gene | Annotation | Difference¹ | SEM | value |

CELL SURFACE

| | | | | |
|---|---|---|---|---|
| MSM1539 | sialic acid synthase, NeuB | 2.30 | 0.79 | 0.23 |
| MSM1305 | adhesin-like protein | 1.84 | 0.22 | 0.04 |
| MSM1112 | adhesin-like protein | 1.31 | 0.08 | 0.39 |
| MSM1113 | adhesin-like protein | 0.93 | 0.09 | 0.85 |
| MSM0411 | adhesin-like protein | 0.65 | 0.02 | 0.0006 |
| MSM1399 | adhesin-like protein | 0.60 | 0.05 | 0.0008 |
| MSM0995 | adhesin-like protein | 0.55 | 0.03 | 0.0009 |
| MSM1534 | adhesin-like protein | 0.52 | 0.10 | 0.03 |

METHANOGENESIS

| | | | | |
|---|---|---|---|---|
| MSM1381 | putative alcohol dehydrogenase, Adh | 2.31 | 0.62 | 0.003 |
| MSM0049 | F420-dependent NADP reductase, Fno | 3.75 | 0.41 | 0.006 |
| MSM0515 | methanol: cobalamin methyltransferase, MtaB | 2.37 | 0.32 | 0.01 |
| MSM0848 | ribofuranosylaminobenzene 5′-phosphate synthase, RfaS | 4.62 | 0.85 | 0.01 |

CARBON ASSIMILATION

| | | | | |
|---|---|---|---|---|
| MSM0330 | acetyl-CoA synthetase, Acs | 1.02 | 0.36 | 0.76 |
| MSM0228 | succinyl-CoA synthetase, alpha subunit, Suc | 1.33 | 0.24 | 0.31 |
| MSM0560 | pyruvate: ferredoxin oxidoreductase, beta subunit, Por | 4.92 | 0.60 | 0.0006 |
| MSM0988 | phosphoenolpyruvate synthase, PpsA | 2.72 | 0.42 | 0.002 |
| MSM0654 | carbonic anhydrase, Cab | 1.69 | 0.10 | 0.005 |
| MSM0991 | bicarbonate ABC transporter, substrate-binding component, | 0.55 | 0.05 | 0.005 |
| MSM0291 | bicarbonate ABC transporter, permease component, BtcB | 0.45 | 0.04 | 0.0006 |

NITROGEN ASSIMILATION

| | | | | |
|---|---|---|---|---|
| MSM0234 | ammonium transporter, AmtB | 2.88 | 0.24 | 0.0002 |
| MSM0888 | glutamate dehydrogenase, AdhA | 2.55 | 0.72 | 0.05 |
| MSM0027 | glutamate synthase, AltB | 2.35 | 0.64 | 0.006 |
| MSM0368 | glutamate synthase (NADPH), alpha subunit, GltA | 2.89 | 0.60 | 0.008 |
| MSM1418 | glutamine synthetase, GlnA | 19.06 | 5.35 | 0.0005 |

LIPID METABOLISM

| | | | | |
|---|---|---|---|---|
| MSM0227 | Hydroxymethylglutaryl-CoA (HMG-CoA) reductase, HmgA | 0.78 | 0.11 | 0.15 |

¹M. smithii gene expression in vivo in the presence of B. thetaiotaomicron vs. alone

TABLE 12
InterPro-based classification of adhesin-like proteins (ALPs)
in the M. smithii and M. stadtmanae proteomes

[chemical structure]

[chemical structure]

[chemical structure]

[chemical structure]

¹Predictions completed using NetNGlyc and NetOglyc (htt://www.cbs.dtu.dk/services/).
²InterPro domains: Invasin/intimin cell-adhesion (PR008964); Bacterial lg-like (IPR003344); pectin lyase fold (IPR011050); GAGlyase,Chondroitinase B-type (IPR12333); Polymorphic membrane protein, Chlamydia (IPR03368); Parallel beta-helix repeat (IPR006626); Peptidase S8 and S53 (IPR000209); Penicillin-binding protein, transpeptidase fold (IPR012338); Carboxypeptidase regulatory region (IPR008969)

TABLE 13
M. smithii GeneChip
Genes Probe Average number of Naming Prefix Represented
Probesets pairs probe pairs per probeset

| | | | | | |
|---|---|---|---|---|---|
| control sequences | AFFX | 64 | 64 | 1024 | 16 |
| protein coding genes | MSM | 1778 | 2018 | 19967 | 11 |
| tRNA genes (1-2 | MSM-tRNAxx | 34 | 74 | 450 | 11 |
| probesets/gene) | | | | | |
| rRNA genes¹ | MSMxx-rRNA | 8 | 7 | 77 | 11 |
| intergenic sequences | ig | | 1581 | 4931 | 3 |

¹Note that the M. smithii genome contains three 5S rRNA genes, one 7S rRNA gene, two 16S rRNA genes, and two 23S rRNA genes. Due to the high nucleotide sequence identity among rRNA genes of a given type, each is represented by a single probeset (the 16S rRNA probeset is replicated four times on the GeneChip

TABLE 14
BLAST analysis of the putative M. smithii prophage

| | Phage | | | | |
|---|---|---|---|---|---|
| M. smithii | Protein | | | | |
| Protein | Sequence ID* | Function | HMM Annotation | Phage HMM | E value |
| MSM1640 | 5417 | unknown | Phage_integrase: Phage integrase family | PF00589 | 2.30E−06 |
| MSM1654 | 5721 | Gp40 | ERF: ERF superfamily | PF04404 | 6.90E−11 |
| MSM1671 | 5397 | large terminase subunit | psiM2_ORF9: phage uncharacterized protein, | TIGR01630 | 0.0042 |
| | | | C-terminal domain | | |
| MSM1672 | 5398 | portal protein | portal_PBSX: phage portal protein, PBSX | TIGR01540 | 6.70E−12 |
| | | | family | | |
| MSM1675 | 6246 | putative structural protein | | | |
| MSM1677 | 6247 | putative structural protein | | | |
| MSM1684 | 20206 | ORF001 | TMP: TMP repeat | PF05017 | 0.0036 |
| MSM1691 | 6262 | PeiW | | | |

*from the Phage Sequence Databank

TABLE 15
Primers used for qRT-PCR assays
AMPLICON ORF ANNOTATION PRIMER SEQUENCE (5′ −> 3′) SIZE (bp)

| | | | | |
|---|---|---|---|---|
| MSM0027 | glutamate synthase, GltB | MSM0027.F | GAAGGCCGTCCGATAGGTA | 117 |
| | | MSM0027.R | CTCCAGTAGCTCCCCCTCTT | |
| MSM0049 | F420-dependent NADP reductase, Fno | MSM0049.F | GGGTTCAGCAGCAGAAAGG | 118 |
| | | MSM0049.R | CACATTCAATTGGGTCTGGA | |
| MSM0227 | HMG-CoA reductase, HmgA | MSM0227.F | GGCTGTGAATTACCGCATATGG | 117 |
| | | MSM0227.R | TAACGGTCCGGCTACACCTACA | |
| MSM0028 | succinyl-CoA synthetase, Suc | MSM0228.F | TGCTCGTGAAATGGACACTACAG | 165 |
| | | MSM0228.R | GTAAGCTGGCTGGCTACTTCGT | |
| MSM0234 | ammonium transporter, AmtB | MSM0234.F | TTTCTGGTGGTGTTGTTGGA | 115 |
| | | MSM0234.R | TAACCATCCTCCACCCCATA | |
| MSM0291 | bicarbonate ABC transporter, | MSM0291.F | TCTGCAGTACCGCCTATAGTTTCC | 101 |
| | permease component, BtcA | MSM0291.R | CCTAAACCGCTACTTGAACCTATCA | |
| MSM0330 | acetyl-CoA synthetase, Acs | MSM0330.F | ATCGAAGAGGAAAGCGATGA | 103 |
| | | MSM0330.R | GGAAGTCCGCTTGTACCTGA | |
| MSM0368 | glutamate synthase (NADPH), | MSM0368.F | GGAATGCTTCCTGAAGAACG | 127 |
| | alpha subunit, GltA | MSM0368.R | GCCCCCTGACCTATTTTGAT | |
| MSM0411 | adhesion-like protein | MSM0411.F | TCAGAATTGCAGGTGGTTTGG | 129 |
| | | MSM0411.R | CGTGAACATCCATCCCATTTAC | |
| MSM0515 | methanol: cobalamin methyl- | MSM0515.F | ATGTGGTGCAAAAGGACCTC | 112 |
| | transferase, MtaB | MSM0515.R | CAGAGTGTGCACAAACAGCA | |
| MSM0516 | corrinoid protein | MSM0516.F | CGTAGAAGCTTACCACACACCA | 108 |
| | | MSM0516.R | CGGTACGAATTCCCCTACAA | |
| MSM0518 | methylcobalamin: coenzyme M | MSM0518.F | TATTGCATATCTGCGGGTCA | 112 |
| | methyltransferase | MSM0518.R | GATGCTTTCCTTGGCTTTTG | |
| MSM0560 | pyruvate: ferredoxin | MSM0560.F | CAATCATTATCCGGAGCAATGG | 104 |
| | oxidoreductase, ProB | MSM0560.R | GGTGTTGCACCACTTCTTTGGA | |
| MSM0572 | methylene-H4MPT dehydrogenase, Hmd | MSM0572.F | ACCCAGGTGCTGTACCTGAAAT | 119 |
| | | MSM0572.R | TGTGAATGCAGATCCTCTTGCT | |
| MSM0654 | carbonic anhydrase, Cab | MSM0654.F | TGGTGCTGTTGTTCATGGAT | 112 |
| | | MSM0654.R | CAGCTCCAGCCCCTACAATA | |
| MSM0848 | ribofuranosylaminobenzene | MSM0848.F | CCAGCATTTGGCCATTCAA | 146 |
| | 5′-phosphate synthase, RfaS | MSM0848.R | GGTCCAAAAGAGCTCATACCTACAC | |
| MSM0888 | glutamate dehydrogenase, GhdA | MSM0888.F | TGCTCTTCCATGTGCAACTC | 100 |
| | | MSM0888.R | TAGGCATGTTTGCACCTTCA | |
| MSM0986 | conjugated bile salt acid | MSM0986.F | TTATAGTCGGGGAATGGGTTC | 109 |
| | hydrolase | MSM0986.R | TTTCAGAATCTCCGGAAACG | |
| MSM0988 | phosphoenolpyruvate synthase, PpsA | MSM0988.F | CAAGCTCATTATGGCGAACCA | 110 |
| | | MSM0988.R | GCTACGCCATTGTCATCACCTA | |
| MSM0991 | bicarbonate ABC transporter, | MSM0991.F | TTGCACGTGAAGACGGTTATG | 111 |
| | substrate-binding component, BtcB | MSM0991.R | CCTGACCCTGTTTAACTGCATCAT | |
| MSM0995 | adhesin-like protein | MSM0995.F | GTGATGCATTAGAAGAGGCTCCTT | 113 |
| | | MSM0995.R | ATCTCCCGCAGGCATGATAGTT | |
| MSM1014 | MtrE | MSM1014.F | AACAAAGCGGCTTCTGGTGAA | 127 |
| | | MSM1014.R | CGACACAAGATCCCATTGCAAT | |
| MSM1078 | sodium: bile transporter | MSM1078.F | GCTGTTTCTGGAAGTTCCGCTTA | 105 |
| | | MSM1078.R | CCTAGAAGCGGTGTCCAGATAAAGT | |
| MSM1112 | adhesion-like protein | MSM1112.F | GCTAAATTCACTGACAGCACAGGA | 114 |
| | | MSM1112.R | ACCCAAATCAGCTACACCGTCTT | |
| MSM1113 | adhesion-like protein | MSM1113.F | TCGCATAGGACTTGGATTAGGA | 107 |
| | | MSM1113.R | CAACAGCCCCTTCAATTAACCT | |
| MSM1198 | O-sialglycoprotein endopeptidase | MSM1198.F | GCTGCCGAACATCATGGAT | 162 |
| | | MSM1198.R | TAGTGCCAGTGTTCTTGCAGAA | |
| MSM1282 | adhesion-like protein | MSM1282.F | GCGGCATTATCTTTTTCAGCTG | 183 |
| | | MSM1282.R | AGCAGGTACATCCCCTCCAGTA | |
| MSM1305 | adhesion-like protein | MSM1305.F | ACATTAGACGGTCAAGGCAAACC | 131 |
| | | MSM1305.R | TATTCACCGGCCATCAGTCTGATT | |
| MSM1381 | alcohol dehydrogenase, Adh | MSM1381.F | AAGAAGTCCCGGAATGTGG | 102 |
| | | MSM1381.R | TCCGATAGCTCCTTCCCATA | |
| MSM1399 | adhesion-like protein | MSM1399.F | CTGCAACTACTTCTGGAGGATCA | 117 |
| | | MSM1399.R | CCATCACTAGAACCAGAGTCACTTG | |
| MSM1418 | glutamine synthetase, GlnA | MSM1418.F | GACGGAAAACCATTTGTTGG | 141 |
| | | MSM1418.R | GCATTGGGTATCCTTCATCG | |
| MSM1534 | adhesion-like protein | MSM1534.F | AATCCACATCTGATGCAGCTGTC | 239 |
| | | MSM1534.R | TCCCATGTCGGAGTTACAACA | |
| MSM1539 | sialic acid synthase, NeuB | MSM1539.F | TGGCAAAATCTGGTGCAGAT | 116 |
| | | MSM1539.R | CCTGACCGTCCCATATTGTTC | |

TABLE 16
M. smithii strain PS treated with varying concentrations of statins
Atorvastatin treated cells, average optical
density (600 nm), standard deviation

| 1 mM | 100 μM | 10 μM | methanol |
|---|---|---|---|
| 0.032 (0.006) | 0.032 (0.003) | 0.03 (0.001) | 0.032 (0.004) |
| 0.018 (0.002) | 0.032 (0.007) | 0.042 (0.004) | 0.07 (0.007) |
| 0.001 (0.003) | 0.031 (0.006) | 0.09 (0.005) | 0.135 (0.008) |
| 0.001 (0.004) | 0.03 (0.007) | 0.079 (0.027) | 0.13 (0.012) |
| 0.008 (0.004) | 0.033 (0.007) | 0.139 (0.043) | 0.234 (0.018) |
| 0.007 (0.012) | 0.033 (0.002) | 0.233 (0.11) | 0.195 (0.05) |
| 0.001 (0.006) | 0.024 (0.007) | 0.115 (0.045) | 0.218 (0.064) |

Pravastatin treated cells, average optical
density (600 nm), standard deviation

| 1 mM | 100 μM | 10 μM | ethanol |
|---|---|---|---|
| 0.034 (0.003) | 0.035 (0.003) | 0.039 (0.004) | 0.036 (0.005) |
| 0.036 (0.006) | 0.069 (0.02) | 0.066 (0.003) | 0.072 (0.012) |
| 0.031 (0.003) | 0.104 (0.03) | 0.097 (0.025) | 0.128 (0.011) |
| 0.038 (0.003) | 0.104 (0.024) | 0.084 (0.009) | 0.109 (0.011) |
| 0.026 (0.006) | 0.139 (0.078) | 0.08 (0.014) | 0.223 (0.015) |
| 0.016 (0.01) | 0.217 (0.175) | 0.181 (0.048) | 0.258 (0.105) |
| 0.017 (0.004) | 0.297 (0.111) | 0.039 (0.015) | 0.212 (0.113) |

Rosuvastatin treated cells, average optical
density (600 nm), standard deviation

| 1 mM | 100 μM | 10 μM | DMSO |
|---|---|---|---|
| 0.031 (0.002) | 0.031 (0.003) | 0.034 (0.002) | 0.033 (0.002) |
| 0.024 (0.006) | 0.026 (0.009) | 0.068 (0.006) | 0.075 (0.006) |
| 0.017 (0.006) | 0.021 (0.002) | 0.101 (0.009) | 0.125 (0.013) |
| 0.03 (0.014) | 0.02 (0.004) | 0.082 (0.011) | 0.093 (0.007) |
| 0.013 (0.008) | 0.027 (0.016) | 0.122 (0.039) | 0.152 (0.05) |
| 0.018 (0.004) | 0.033 (0.005) | 0.159 (0.058) | 0.117 (0.029) |
| 0.003 (0.002) | 0.033 (0.042) | 0.174 (0.146) | 0.183 (0.071) |

TABLE 17
M. smithii strain F1 treated with varying concentrations of statins
Atorvastatin treated cells, average optical
density (600 nm), standard deviation

| 1 mM | 100 μM | 10 μM | methanol |
|---|---|---|---|
| 0.015 (0.006) | 0.01 (0) | 0.019 (0.001) | 0.015 (0.003) |
| 0.008 (0.014) | 0.018 (0.001) | 0.039 (0.004) | 0.045 (0.003) |
| 0.013 (0.01) | 0.018 (0.002) | 0.039 (0.007) | 0.069 (0.002) |
| 0.004 (0.014) | 0.018 (0.003) | 0.056 (0.011) | 0.092 (0.003) |
| 0.001 (0.011) | 0.016 (0.002) | 0.061 (0.023) | 0.115 (0.008) |
| 0.001 (0.015) | 0.015 (0.001) | 0.084 (0.033) | 0.155 (0.019) |

Pravastatin treated cells, average optical
density (600 nm), standard deviation

| 1 mM | 100 μM | 10 μM | ethanol |
|---|---|---|---|
| 0.011 (0.001) | 0.007 (0.002) | 0.019 (0.001) | 0.017 (0.002) |
| 0.022 (0.002) | 0.047 (0.004) | 0.05 (0.003) | 0.05 (0.005) |
| 0.026 (0.003) | 0.066 (0.004) | 0.071 (0.003) | 0.073 (0.006) |
| 0.026 (0.003) | 0.085 (0.008) | 0.102 (0.003) | 0.095 (0.004) |
| 0.022 (0.002) | 0.089 (0.01) | 0.124 (0.004) | 0.121 (0.011) |
| 0.018 (0.003) | 0.133 (0.029) | 0.168 (0.004) | 0.153 (0.024) |

Rosuvastatin treated cells, average optical
density (600 nm), standard deviation

| 1 mM | 100 μM | 10 μM | DMSO |
|---|---|---|---|
| 0.015 (0.003) | 0.01 (0.003) | 0.021 (0.003) | 0.015 (0.003) |
| 0.016 (0.003) | 0.026 (0.003) | 0.046 (0.004) | 0.043 (0.001) |
| 0.019 (0.003) | 0.027 (0.004) | 0.057 (0.002) | 0.062 (0.003) |
| 0.019 (0.003) | 0.026 (0.004) | 0.081 (0.008) | 0.081 (0.005) |
| 0.018 (0.003) | 0.025 (0.001) | 0.085 (0.021) | 0.103 (0.005) |
| 0.02 (0.006) | 0.016 (0.003) | 0.094 (0.048) | 0.102 (0.017) |

TABLE 18
M. smithii strain ALI treated with varying concentrations of statins
Atorvastatin treated cells, average optical
density (600 nm), standard deviation

| 1 mM | 100 μM | 10 μM | methanol |
|---|---|---|---|
| 0.01 (0.008) | 0.015 (0.003) | 0.012 (0.002) | 0.019 (0.004) |
| 0.016 (0.007) | 0.008 (0.002) | 0.026 (0.016) | 0.043 (0.015) |
| 0.052 (0.063) | 0.002 (0.001) | 0.058 (0.084) | 0.046 (0.022) |
| 0.018 (0.028) | 0.014 (0.016) | 0.072 (0.066) | 0.074 (0.024) |
| 0.025 (0.043) | 0.008 (0.014) | 0.031 (0.046) | 0.06 (0.044) |
| 0.01 (0.012) | 0.001 (0) | 0.024 (0.02) | 0.093 (0.053) |

Pravastatin treated cells, average optical
density (600 nm), standard deviation

| 1 mM | 100 μM | 10 μM | ethanol |
|---|---|---|---|
| 0.013 (0.002) | 0.011 (0.003) | 0.015 (0.001) | 0.025 (0.009) |
| 0.036 (0.045) | 0.054 (0.036) | 0.06 (0.027) | 0.047 (0.012) |
| 0.103 (0.176) | 0.072 (0.076) | 0.071 (0.037) | 0.061 (0.026) |
| 0.051 (0.027) | 0.079 (0.122) | 0.086 (0.048) | 0.083 (0.036) |
| 0.018 (0.026) | 0.104 (0.154) | 0.083 (0.053) | 0.083 (0.038) |
| 0.081 (0.032) | 0.091 (0.143) | 0.116 (0.05) | 0.111 (0.047) |

Rosuvastatin treated cells, average optical
density (600 nm), standard deviation

| 1 mM | 100 μM | 10 μM | DMSO |
|---|---|---|---|
| 0.017 (0.007) | 0.029 (0.016) | 0.019 (0.005) | 0.014 (0.002) |
| 0.032 (0.02) | 0.033 (0.037) | 0.044 (0.008) | 0.04 (0.007) |
| 0.02 (0.02) | 0.012 (0.009) | 0.038 (0.011) | 0.044 (0.008) |
| 0.013 (0.01) | 0.028 (0.021) | 0.056 (0.036) | 0.058 (0.006) |
| 0.015 (0.009) | 0.015 (0.018) | 0.074 (0.036) | 0.085 (0.003) |
| 0.016 (0.01) | 0.015 (0.026) | 0.1 (0.02) | 0.126 (0.013) |

TABLE 19
M. smithii strain B181 treated with
varying concentrations of statins
Atorvastatin treated cells, average optical
density (600 nm), standard deviation

| 1 mM | 100 μM | 10 μM | methanol |
|---|---|---|---|
| 0.007 (0.004) | 0.004 (0.001) | 0.011 (0.001) | 0.007 (0.003) |
| 0.018 (0.001) | 0.013 (0.003) | 0.032 (0.007) | 0.034 (0.006) |
| 0.014 (0.003) | 0.005 (0.002) | 0.032 (0.006) | 0.046 (0.022) |
| 0.009 (0.002) | 0.003 (0.005) | 0.04 (0.008) | 0.07 (0.029) |
| 0.01 (0.004) | 0.003 (0) | 0.044 (0.011) | 0.121 (0.027) |
| 0.01 (0.003) | 0.006 (0.001) | 0.048 (0.009) | 0.133 (0.026) |

Pravastatin treated cells, average optical
density (600 nm), standard deviation

| 1 mM | 100 μM | 10 μM | ethanol |
|---|---|---|---|
| 0.007 (0.001) | 0.003 (0.001) | 0.011 (0.001) | 0.009 (0.003) |
| 0.019 (0.003) | 0.039 (0.005) | 0.047 (0.002) | 0.039 (0.013) |
| 0.015 (0.008) | 0.061 (0.004) | 0.061 (0.003) | 0.048 (0.03) |
| 0.014 (0.001) | 0.088 (0.002) | 0.102 (0.007) | 0.094 (0.075) |
| 0.016 (0.002) | 0.114 (0.006) | 0.135 (0.01) | 0.137 (0.057) |
| 0.015 (0.006) | 0.171 (0.031) | 0.198 (0.02) | 0.14 (0.037) |

Rosuvastatin treated cells, average optical
density (600 nm), standard deviation

| 1 mM | 100 μM | 10 μM | DMSO |
|---|---|---|---|
| 0.01 (0) | 0.006 (0.006) | 0.012 (0.002) | 0.005 (0.004) |
| 0.016 (0.004) | 0.013 (0.003) | 0.029 (0.001) | 0.032 (0.003) |
| 0.011 (0.002) | 0.008 (0.001) | 0.04 (0.001) | 0.066 (0.02) |
| 0.01 (0.005) | 0.007 (0.003) | 0.066 (0.005) | 0.095 (0.018) |
| 0.014 (0.004) | 0.004 (0.002) | 0.097 (0.014) | 0.148 (0.032) |
| 0.008 (0.003) | 0.001 (0.002) | 0.121 (0.012) | 0.194 (0.073) |

### Materials and Methods for Examples 6-11

[0168] Isolation and Culturing of M. smithii from Human Fecal Samples

[0169] Two gallon stainless steel paint canisters (Binks; catalog number 83S-210) were modified for incubation of plates at 37° C. in an oxygenfree mixture of 20% CO₂/80% H₂ at a pressure of 15 psi. Canisters contained a heating element (Electro-Flex Pail Heaters) regulated by a custom designed controller consisting of a 16A2120 temperature/process control (Love Controls; Dwyer Instruments), a resistance temperature detector probe to measure the internal tank temperature, and several safety features to prevent overheating or burns. Pressure in each tank was measured and recorded with a digital manometer (LEO record; Omni Instruments). The apparatus was housed inside an anaerobic chamber (COY Labs). All human fecal samples used in this study were obtained by using protocols approved by the Washington University Human Research Protection Office and its constituent review committees. All samples were deidentified and assigned codes as described in a previous publication (65): Information about the age and BMI of the donors can also be found in this publication. All samples were frozen at −20° C. within 30 min after they had been produced by donors; they were then placed in a standard −80° C. freezer no more than 24 h later and stored at this temperature for at least 1 yr prior to their use in the present study. An ≈2-g aliquot of a given frozen fecal sample was thawed (inside of the Coy anaerobic Chamber) and serially diluted in modified MBC medium (66) within the anaerobic chamber. Aliquots of serial dilutions (10⁻² to 10⁻⁸) were transferred to 14 mL of MBC supplemented with 5% rumen fluid, 10 μg/mL erythromycin, 1 μg/mL ampicillin, 10 μg/mL vancomycin and 10 mg/mL amphotericin B. The mixture was introduced into 125-mL serum bottles (Bellco Glass). These enrichment cultures were incubated under a fully deoxygenated atmosphere of 20% CO₂/80% H₂ (30 psi of pressure) at 37° C. After at least 7 d, aliquots were plated onto MBC noble agar and the plates were incubated in the custom pressurized tanks described above for colony isolation. In parallel, the same serial dilutions were spread directly onto MBC noble agar plates with antibiotics. All plates were incubated under an atmosphere of 20% CO₂/80% H₂ (15 psi of pressure) in our custom PHAT (Pressurized Heated Anaerobic Tank) system at 37° C. Colonies were picked and screened by PCR of their 16S rRNA genes by using bacterial primers 8F (5′-AGAGTTTGATCCTGGCTCAG-3′) and 1391R (5′-GACGGGCGGTGWGTRCA-3′) and archaeal primers 571aF (5′-GCYTAAAGSRICCGTAGC-3′) and 958aR (5′-YCCGGCGTTGAMTCCAATT-3′). Amplicons generated from archaeal-directed primers were sequenced using the method of Sanger (Retrogen).

[0170] Pure isolates were then cultured anaerobically in MBC medium in a fully deoxygenated atmosphere of 20% CO₂/80% H₂ (30 psi of pressure) at 37° C. Cells were harvested by centrifugation, and DNA was isolated by phenol-chloroform and ethanol precipitation, as described (50). The purity of each DNA preparation was verified by gel electrophoresis.

qPCR Assay of mcrA in Human Fecal Samples

[0171] Frozen fecal samples were pulverized by manual grinding under liquid nitrogen, and crude DNA was isolated by bead beating and phenol/chloroform extraction. The Qiagen Blood and Tissue kit was used to clean up the crude DNA and remove RNA and protein. Twenty nanograms of purified community DNA was amplified by using an Mx3000 real-time PCR system (Stratagene) in 25-μL reaction mixtures containing SYBR-green and 0.8 μM McrA_MLf/r primers (5′-GGTGGTGTMGGATTCACACARTAYGCWACAGC-3′ and 5′-TTCATTGCRTAGTTWGGRTAGTT-3′; ref. 14), which amplified a ≈450-bp region of mcrA. Cycling conditions were as follows: 40 cycles of denaturing at 94° C. for 45 s, annealing 56° C. for 45 s, extension 72° C. for 30 s, with collections at 79-81° C. A subsequent dissociation curve was used to examine the homogeneity of amplicons, to detect the presence of primer dimers, and to determine the appropriate collection temperature.

[0172] A standard curve was constructed with purified M. smithii gDNA at concentrations ranging from 0.01 ng to 10 ng and used to define the concentration of mcrA DNA in each of the fecal DNA samples. Based on the known genome size of M. smithii PS, we expressed the data as number of genome equivalents (GE) per ng of total fecal DNA. Samples that only produced detectable amplification after 37 cycles of PCR were scored as “negative,” as were samples having <40 GE per ng of DNA. Data were not normally distributed; therefore, a log-base 10 transformation was performed.

[0173] A subset of samples was selected for amplicon sequencing to determine the identity and diversity of mcrA sequences amplified by these primers, and whether archaeal DNA was present in these samples that was not found by our mcrA-based primers. The latter was determined by using PCR primers directed at archaeal 16S rRNA genes [571aF (5′-GCYTAAAGSRICCGTAGC-3′; ref. 63) and 958aR (5′-YCCGGCGTTGAMTCCAATT-3′; ref. 64)] and the following cycling conditions; 30 cycles of denaturing at 94° C. for 2 min, annealing at 65° C. for 45 s, and extension at 72° C. for 2 min. Amplicons were sequenced using the method of Sanger (Retrogen).

### Genome Sequencing

[0174] Methanobrevibacter smithii strain PS (ATCC 35061) was grown as described above for 6d at 37° C. DNA was recovered from harvested cell pellets using the QIAGEN Genomic DNA Isolation kit with mutanolysin (1 unit/mg wet weight cell pellet; Sigma) added to facilitate lysis of the microbe. An ABI 3730xl instrument was used for paired end-sequencing of inserts in a plasmid library (average insert size 5 Kb; 42,823 reads; 11.6×-fold coverage), and a fosmid library (average insert size of 40 Kb; 7,913 reads; 0.6×-fold coverage). Phrap and PCAP (Huang et al. (2003) Genome Res 13:2164-70) were used to assemble the reads. A primer-walking approach was used to fill-in sequence gaps. Physical gaps and regions of poor quality (as defined by Consed; Gordon et al., (1998) Genome Res. 8, 195-202) were resolved by PCR-based re-sequencing. The assembly's integrity and accuracy was verified by clone constraints. Regions containing insufficient coverage or ambiguous assemblies were resolved by sequencing spanning fosmids. Sequence inversions were identified based on inconsistency of constraints for a fraction of read pairs in those regions. The final assembly consisted of 12.6× sequence coverage with a Phred base quality value ≧40. Open-reading frames (ORFs) were identified and annotated as described below.

### Horizontal Gene Transfer (HGT) Analysis

[0175] For each gene call, compositional statistics were calculated by using the PyCogent code base (67). The statistics included the GC content at each position, three versions of the dinucleotide use (overlapping, nonoverlapping, or “3-1”), all K-words ranging from length 1 through 6, and codon use (Table 20 and 21). For each M. smithii strain, the composition of each gene was compared against (i) the composition of the genome as a whole and (ii) the composition of highly expressed genes. Genes that mapped to the KEGG orthology (KO) groups for ribosomal proteins were used to calculate the highly expressed test set. The gene and control vectors were compared using either the G-test statistic or Pearson correlation.

TABLE 20
Compositional evidence for HGT in adhesin-like proteins

| | | | | Fold |
|---|---|---|---|---|
| | | Atypical/ | Per- | enrich- |
| Method | Significance Measure | total | cent | ment* |
| 3-1 Dinucleotide | Rank order threshold; | 558/853 | 65% | 6.4 |
| | G-score | | | |
| Codon Usage | Rank order threshold; | 525/853 | 63% | 6.6 |
| | G-score | | | |
| K-words (length 4) | Rank order threshold; | 538/853 | 62% | 8.1 |
| | G-score | | | |
| K-words (length 6) | Rank order threshold; | 445/853 | 52% | 9.3 |
| | G-score | | | |

*Fold-enrichment is relative to the overall levels of HGT predicted by a given method.

TABLE 21
Compositional evidence for HGT in the M. smithii genome

| Method | Significance Measure | Atypical/Total | Percent |
|---|---|---|---|
| 3-1 Dinucleotide | Rank order threshold; | 4200/41694 | 10.1% |
| | G-score | | |
| 3-1 Dinucleotide | Rank order threshold; | 1410/41694 | 3.3% |
| | Pearson correlation | | |
| Codon Usage | Rank order threshold; | 3973/41694 | 9.5% |
| | G-score | | |
| Codon Usage | Rank order threshold; | 1675/41694 | 4.0% |
| | Pearson correlation | | |
| K-words (length 4) | Rank order threshold; | 3230/41694 | 7.7% |
| | G-score | | |
| K-words (length 4) | Rank order threshold; | 223/41694 | 5.3% |
| | Pearson correlation | | |
| K-words (length 6) | Rank order threshold; | 2336/41694 | 5.6% |
| | G-score | | |
| K-words (length 6) | Rank order threshold; | 3300/41694 | 7.9% |
| | Pearson correlation | | |

[0176] The significance of the results was calculated in two ways; first, the Bonferroni corrected P value was calculated for the G-test; second, because the distribution of compositional counts may violate normality, the method of picking significance thresholds based on the rank order of gene scores of Tsirigos et al. (57) was employed.

[0177] Because highly expressed genes frequently possess unusual gene compositions, gene transfer was predicted only in cases where the gene did not match the whole-genome model, and the gene also did not match the highly expressed model. Annotated tRNAs and rRNAs were also excluded from the analysis.

[0178] Phylogenetic confirmation of gene transfers predicted by compositional means was performed using the RIATA-HGT program of PhyloNet version 1.7 (68). We obtained all available gene sequences for all KO groups that contained one or more M. smithii genes. Annotations for gene family level KEGG assignments were obtained by blasting each protein sequence against version 54 of the KEGG database. The best hit with a KEGG assignment was taken. Multiple assignments were given if the best hit had more than one annotation.

[0179] Python scripts were used to generate separate FASTA files for each orthology group containing the amino acid sequences for M. smithii and KEGG proteins. All sequences for each orthology group were then separately aligned in MUSCLE (69) by using maxiters=4, and gene trees for each group were constructed in FASTTREE (70).

[0180] PhyloNet requires that no paralogs be present on protein trees. Therefore, multiple members of a KO present in a single KEGG genome were reduced to a single copy by removing sequences that produced the longest branches on the resulting phylogenetic tree. However, for M. smithii genes, we wanted to ensure that the process of paralog resolution did not prevent detection of possible xenologs (extra gene copies introduced by gene transfer). Therefore, all M. smithii genes were retained in each gene tree in the analysis. The species tree used consisted of the KEGG 16S rRNA sequences for each lineage in the tree, gathered by BLAST against the E. coli rrsG gene, and alignment in PyNAST. The location of “msi,” the M. smithii strain present in KEGG, was taken as the tree position for all M. smithii.

[0181] Because all multiple copies of gene family members were retained in M. smithii genomes, it was necessary to introduce an artificial polytomy into the species tree at the location of msi, with one tip for each paralog/strain combination. This approach is identical to separately running each gene copy, but is computationally more tractable because it avoids reinferring all transfers not involving M. smithii across the rest of the tree many times.

### Microbial RNA-Seq.

[0182] M. smithii strains were grown in standard MBC medium containing 2.8 or 44.1 mM formate. Medium was prepared anaerobically and aliquoted into 125-mL serum bottles, which were sealed and autoclaved. Triplicate cultures of each strain and condition were grown at 37° C. with agitation (100 rpm), in serum bottles containing 21 mL of medium plus 0.5 mL of 2.5% Na₂S, under an atmosphere of 80% H₂ and 20% CO₂ that was replenished every 6 h to a pressure of 30 psi. Seven milliliters of the culture were harvested at 36 h (FIG. 24A), placed directly into an equal volume of RNA-Protect (Qiagen), incubated for 5 min at room temperature, then centrifuged for 15 min at 3,220×g at 4° C. RNA was harvested by bead beating and phenol-chloroform extraction, and then treated with Turbo DNase (Ambion) and Baseline-ZERO DNase (Epicenter) to remove genomic DNA (71). RNA was then purified with the MEGAClear kit (Ambion), which also removes tRNAs and 5S rRNA. Ribosomal RNA was further depleted by using custom biotinylated oligos (Table 22) bound to magnetic Streptavidin Dynabeads (Invitrogen). Depleted RNA was reverse transcribed to doublestranded cDNA, then prepared for sequencing on an Illumina GAIIx instrument with 4 nucleotide barcoded adapters (71). Reads were assigned to barcodes, rRNA sequences were pruned, and the remaining reads were mapped to each strain's genome by using custom scripts (71) that use the ssaha mapping algorithm (72).

TABLE 22
Sequences of depletion oligos designed to remove
M. smithii 16S and 23s rRNAs.

| Name | Sequence |
|---|---|
| 16S_depl_61 | CTACGACTAAGTTTAGAGGATTACCTCCGC |
| 16S_depl_346 | TTGTCTCAGGTTCCATCTCCGGGCTCTTGC |
| 16S_depl_595 | CTAAGGGTAGGTTATCCACGTGTTACTGAG |
| 16S_depl_746 | AGGACTACCCGGGTATCTAATCCGGTTCGC |
| 16S_depl_1092 | GCGTGGGTCTCGCTCGTTGCCTGACTTAAC |
| 16S_depl_269 | AAAAGGGATTCAGTTTGTTCTAAGTCGATT |
| 16S_depl_733 | TTCCCTACGACTACAAGGATAAAAACCTTT |
| 16S_depl_1146 | AGTCTGAGTTGGTTTCTCTTTCGGGACACA |
| 16S_depl_1401 | CTGCTACTACTACCAGGATCCACATACCTG |
| 16S_depl_2644 | CAGGATGGAAAGAACCGACATCGAAGTAGC |
| 16S_depl_2704 | CCAGCTCACGTTCCCCTTTAATGGGCGAAC |

Comparison of RNA-Seq and Custom Affymetrix M. smithii GeneChips

[0183] RNA from four samples of M. smithii PS (two replicates at each formate concentration) were split into aliquots for subsequent GeneChip target preparation, or for rRNA depletion and RNASeq. Nearly 106 million 36-nt Illumina GA-IIx reads were generated from the 4 samples (each sample run on a single lane of the eight-lane flow cell): 7.2 million of these reads mapped to coding regions (6.9%), whereas the remaining reads mapped to rRNA genes or other noncoding regions of the genome. Tables 20-31 were also generated for each replicate sample by using custom M. smithii GeneChips that have been described in an earlier report (50). GeneChip data were processed (see ref. 50 for details), and the resulting datasets were compared with RNA-Seq data (counts per million reads, normalized for gene length). The results obtained with each type of data were highly similar: Pearson's correlation r² values ranged from 0.86 to 0.89 for each replicate (P<2e⁻¹⁶; FIG. 26).

### Other Methods

[0184] Analyses of familial concordance or correlation for methanogen carriage or levels, and of their associations with overweight/obesity, were conducted by using logistic or linear regression, a robust variance estimator to adjust for the nonindependence of observations on family members.

### Example 6

### Detection of Insertion Sequence (IS) Elements and Prophages

[0185] A putative rearrangement was discovered in the M. smithii PS type strain by aligning draft assemblies of other strains using Mauve (49). This putative rearrangement is further evidenced by flanking transposases (Msm1419, Msm0730). When the type strain was first sequenced (50), a large number of genes predicted to be involved in genome evolution was noted: restriction modification systems, transposases, recombinases, and insertion sequence (IS) elements. IS finder (www-is.biotoul.fr) was able to detect matches to a known M. smithii IS element, ISM1, which is a member of the ISNCY family, and no other significant matches. However, the number of matches varied between strains quite considerably (Table 23).

[0186] A recent metagenomic study of the fecal viromes of adult female MZ twins showed that viromes are unique to individuals regardless of their degree of genetic relatedness. Intrapersonal diversity is very low with >95% of virotypes retained over a 1-yr period. Moreover, an individual's virome is dominated by a few temperate phage that exhibit remarkable genetic stability. These results indicated that a predatory Lotka-Volterra (LV)/Kill-the-Winner dynamic manifest in a number of other characterized environmental ecosystems is notably absent in the distal intestine where a more temperate phage lifestyle is evident (51). Therefore, it was of interest to characterize phage diversity in M. smithii as a function of host and family.

[0187] Prophages were detected by PhageFinder (52) in 7 of the 20 strains, including 4 of the 5 strains isolating one of the dizygotic twins (TS146), one strain from her co-twin (TS145), and two strains from their mother (TS147). When prophage sequences were blasted against the other strains, prophages were identified in two more strains, one from the mother of the MZ twins (METSMITS96C), and another from TS145 (METSMITS145A) (Table 23).

[0188] To identify regions of variation within these prophage, raw 454 Titanium reads for each strain were aligned (nucmer; ref. 53) to the prophage sequence of the PS type strain (coordinates 1705364:1736208). The results were plotted with Mummer (53) and overlayed to create a single plot with the PS type strain prophage gene calls displayed (FIG. 27). Regions of greatest variation in the prophage were in genes encoding the phage's tail protein (Msm1684), a putative PeiW-related protein (Msm1691, a predicted pseudomurein endoisopeptidase; see ref. 54) and several hypothetical proteins (Msm1674 and Msm1688).

TABLE 23
Summary of genome sequencing effort, assembly statistics and annotation results obtained for the
20 strains isolated in the present study ( Examples 6-11) and 3 previously identified isolates.

| | | number of | number of | | N50 | total |
|---|---|---|---|---|---|---|
| | | 36 nt | 454 Titanium | number of | contig | assembly |
| | strain name | Illumina reads | reads | contigs | size | size |
| MZ twin 1 | METSMITS94A | 5,049,552 | 449,545 | 47 | 120,002 | 1,889,378 |
| | METSMITS94B | 4,785,200 | 76,513 | 58 | 90,573 | 1,886,020 |
| | METSMITS94C | 20,939,658 | 433,652 | 50 | 108,845 | 1,910,054 |
| MZ twin 2 | METSMITS95A | 6,264,402 | 73,255 | 56 | 77,936 | 1,992,157 |
| | METSMITS95B | 3,557,512 | 85,737 | 44 | 133,694 | 1,972,498 |
| | METSMITS95C | 4,559,830 | 96,757 | 37 | 96,923 | 1,978,848 |
| | METSMITS95D | 22,316,058 | 415,598 | 58 | 94,662 | 2,011,683 |
| Mother of | METSMITS96A | 29,499,134 | 260,162 | 47 | 98,370 | 1,975,004 |
| MZ twins | METSMITS96B | 28,356,554 | 274,657 | 45 | 94,662 | 1,869,210 |
| | METSMITS96C | 25,292,727 | 190,329 | 108 | 43,698 | 1,818,239 |
| DZ twin 1 | METSMITS145A | 6,536,457 | 83,667 | 44 | 103,481 | 1,782,572 |
| | METSMITS145B | 8,277,390 | 45,203 | 54 | 80,226 | 1,797,373 |
| DZ twin 2 | METSMITS146A | 27,011,849 | 49,854 | 66 | 73,601 | 1,791,997 |
| | METSMITS146B | 26,899,427 | 58,633 | 43 | 147,680 | 1,794,702 |
| | METSMITS146C | 8,007,300 | 27,844 | 102 | 43,081 | 1,947,483 |
| | METSMITS146D | 9,210,075 | 73,182 | 33 | 139,646 | 1,713,264 |
| | METSMITS146E | 9,763,978 | 107,106 | 64 | 81,915 | 1,952,171 |
| Mother of | METSMITS147A | 10,284,342 | 375,219 | 61 | 87,700 | 2,008,979 |
| DZ twins | METSMITS147B | 8,551,491 | 230,907 | 40 | 99,611 | 1,965,064 |
| | METSMITS147C | 9,321,088 | 68,487 | 40 | 256,349 | 1,973,030 |
| Culture | MsmPS | | | 1 | | 1,853,160 |
| Collection | (NC_009515) | | | | | |
| (previously | METSMIALI | | | 24 | 226,159 | 1,704,865 |
| sequenced) | (DSM2375) | | | | | |
| | METSMIF1 | | | 25 | 1,043,555 | 1,727,775 |
| | (DSM2374) | | | | | |

| | | | | | number of | |
|---|---|---|---|---|---|---|
| | | | | | IS elements | presence |
| | coverage by | coverage by | total fold- | number | identified total | of |
| strain name | Illumina | Titanium | coverage | of CDS | (number >58 nt) | prophage |
| METSMITS94A | 96 | 83 | 179 | 1808 | 12(7) | |
| METSMITS94B | 91 | 14 | 106 | 1856 | 12(9) | |
| METSMITS94C | 395 | 79 | 474 | 1812 | 13(9) | |
| METSMITS95A | 113 | 13 | 126 | 1961 | 17(11) | |
| METSMITS95B | 65 | 15 | 80 | 1895 | 16(8) | |
| METSMITS95C | 83 | 17 | 100 | 1874 | 17(9) | |
| METSMITS95D | 399 | 72 | 472 | 1860 | 20(10) | |
| METSMITS96A | 538 | 46 | 584 | 1852 | 19(11) | |
| METSMITS96B | 546 | 51 | 598 | 1742 | 21(11) | |
| METSMITS96C | 501 | 37 | 537 | 1764 | 3(1) | present |
| METSMITS145A | 132 | 16 | 148 | 1786 | 2(1) | present |
| METSMITS145B | 166 | 9 | 175 | 1880 | 2(1) | present |
| METSMITS146A | 543 | 10 | 552 | 1823 | 2(1) | present |
| METSMITS146B | 540 | 11 | 551 | 1814 | 2(1) | present |
| METSMITS146C | 148 | 5 | 153 | 2355 | 3(1) | |
| METSMITS146D | 194 | 15 | 208 | 1693 | 2(1) | present |
| METSMITS146E | 180 | 19 | 199 | 1887 | 11(4) | present |
| METSMITS147A | 184 | 65 | 250 | 1969 | 9(3) | |
| METSMITS147B | 157 | 41 | 198 | 1911 | 11(5) | |
| METSMITS147C | 170 | 12 | 182 | 2014 | 10(3) | |
| MsmPS | | | | 1793 | 71(51) | present |
| (NC_009515) | | | | | | |
| METSMIALI | | | | 1679 | 14(9) | |
| (DSM2375) | | | | | | |
| METSMIF1 | | | | 1688 | 2(1) | |
| (DSM2374) | | | | | | |

### Example 7

### Monozygotic (MZ) Twins have Higher Concordance for Gut Methanogens than Dizygotic (DZ) Twins

[0189] A quantitative PCR (qPCR) assay of the mcrA gene was used to measure methanogens present in single fecal samples collected from 40 female MZ and 28 adult female DZ twin pairs (age 21-31 y). All were born in Missouri, although at the time they provided samples, only 29% were living in the same home and some lived >800 km apart (2). Based on a health questionnaire, all were healthy and none had a history of gastrointestinal disease including irritable bowel syndrome. Sixty-one percent were obese (BMI 30) and 7% overweight (BMI 25-30) at the time of sampling (2).

[0190] Thirty-two of the 136 individuals (23%) had levels of methanogens above our threshold for confidently calling the fecal sample “positive” (i.e., ≧4×10⁷ genome equivalents per mg of total fecal DNA), and this proportion did not vary significantly by zygosity group (P=0.59). The MZ twin pair concordance rate for carriage of methanogens was 74%, a value significantly higher than the DZ pair concordance rate (15%; P=0.009 by Breslow-Day test). In addition, there was a significantly higher degree of correlation of methanogen levels between MZ pairs by linear regression (r²=0.43, P<0.0001) than DZ pairs (r²=0.04, P=0.32), (FIGS. 16 A and B). Fecal samples were also collected from 23 of the MZ twin pairs and 12 of the DZ pairs 2 mo after the initial time point. Linear regression showed that time point 1 and time point 2 samples were highly correlated for both the presence of methanogens (r²=0.54, P<0.0001; FIG. 16C) and their levels. Neither carriage nor levels of methanogens was significantly correlated with being overweight or obese in this study population (P=0.37 and 0.38, respectively).

[0191] Thirteen samples from the initial timepoint representing 4 MZ twin pairs, 1 DZ twin pair, plus 3 other unrelated individuals that were positive for mcrA were chosen for sequencing of amplicons generated by using the mcrA primers and previously described archaeal 16S rRNA primers (n=5-10 amplicon subclones/primer set/fecal DNA sample). In 12 of the 13 samples, M. smithii was the only sequence detected by mcrA or 16S rRNA-directed PCR. In one MZ co-twin (TS17 in, Tables 24 and 25), 2 of 6 16S rRNA amplicons and 2 of 8 mcrA amplicons matched to Methanosphaera stadtmanae, a mesophilic euryarchaeota known to be present in the gut microbiota of some humans (19); the remaining amplicons generated from her fecal DNA matched to M. smithii. Her co-twin (TS16) had no detectable methanogens.

[0192] Fecal samples from 51 mothers in this study were also examined for presence of methanogens and found a similar overall degree of methanogen carriage in this population as found in their daughters (31% and 25%, respectively). Concordance for carriage of methanogens between mother and daughter (i.e., the probability that the daughter of a methanogen carrier was also a carrier, 32%) was nonsignificant (P=0.33).

TABLE 24
Summary of qPCR results for mcrA (methanogens) and
aps (SRB) in fecal samples from MZ and DZ twins

| | | | Quantification of methanogens | | | | |
|---|---|---|---|---|---|---|---|
| | | | log (mcrA) | | | | SRB |
| TS# | | zygosity | timepoint 1 | timepoint 2 | timepoint 3 | lineage | log aps |
| 1 | Co-twin 1 | MZ | 3.163 | 2.542 | 3.053 | M. smithii | 3.509 |
| 2 | Co-twin 2 | MZ | 3.293 | 3.408 | 3.901 | M. smithii | |
| 4 | Co-twin 1 | MZ | 0.000 | 0.000 | 0.000 | | 0.000 |
| 5 | Co-twin 2 | MZ | 0.000 | 0.000 | 0.000 | | 0.000 |
| 7 | Co-twin 1 | MZ | 0.000 | 0.000 | 0.000 | | 0.000 |
| 8 | Co-twin 2 | MZ | 0.000 | 0.000 | 0.000 | | 3.741 |
| 10 | Co-twin 1 | MZ | 0.000 | 0.000 | | | 0.000 |
| 11 | Co-twin 2 | MZ | 0.000 | | | | |
| 13 | Co-twin 1 | MZ | 0.000 | | | | |
| 14 | Co-twin 2 | MZ | 0.000 | | | | |
| 16 | Co-twin 1 | MZ | 0.000 | | | | 3.402 |
| 17 | Co-twin 2 | MZ | 3.243 | | | M. smithii and | |
| | | | | | | M. stadtmanae | |
| 19 | Co-twin 1 | MZ | 0.000 | | | | |
| 20 | Co-twin 2 | MZ | 0.000 | | | | |
| 22 | Co-twin 1 | MZ | 0.000 | | | | 1.744 |
| 23 | Co-twin 2 | MZ | 0.000 | | | | 0.000 |
| 25 | Co-twin 1 | MZ | 0.000 | 3.053 | | | |
| 26 | Co-twin 2 | MZ | 2.751 | 2.781 | | | |
| 28 | Co-twin 1 | MZ | 3.790 | | | | |
| 29 | Co-twin 2 | MZ | 3.344 | | | | |
| 31 | Co-twin 1 | MZ | 0.000 | | | | |
| 32 | Co-twin 2 | MZ | 0.000 | | | | |
| 34 | Co-twin 1 | MZ | 3.012 | | | M. smithii | 3.073 |
| 35 | Co-twin 2 | MZ | 3.132 | | | M. smithii | 3.356 |
| 37 | Co-twin 1 | MZ | 0.000 | | | | 0.000 |
| 38 | Co-twin 2 | MZ | 0.000 | | | | |
| 40 | Co-twin 1 | MZ | 0.000 | | | | 2.490 |
| 41 | Co-twin 2 | MZ | 0.000 | | | | |
| 43 | Co-twin 1 | MZ | 0.000 | | | | 1.958 |
| 44 | Co-twin 2 | MZ | 3.065 | | | | 0.000 |
| 46 | Co-twin 1 | MZ | 0.000 | | | | |
| 47 | Co-twin 2 | MZ | 1.126 | | | | 0.000 |
| 49 | Co-twin 1 | MZ | 0.000 | 0.000 | | | |
| 50 | Co-twin 2 | MZ | 0.000 | 0.000 | | | |
| 52 | Co-twin 1 | MZ | 0.000 | | | | |
| 53 | Co-twin 2 | MZ | 2.830 | | | | 2.615 |
| 55 | Co-twin 1 | DZ | 0.000 | | | | |
| 56 | Co-twin 2 | DZ | 0.000 | | | | |
| 58 | Co-twin 1 | MZ | 0.000 | | | | |
| 59 | Co-twin 2 | MZ | 1.582 | | | | |
| 61 | Co-twin 1 | DZ | 0.000 | 0.000 | | | 0.000 |
| 62 | Co-twin 2 | DZ | 0.052 | 0.000 | | | 0.000 |
| 64 | Co-twin 1 | MZ | 3.002 | | | | |
| 65 | Co-twin 2 | MZ | 0.000 | | | | 0.000 |
| 67 | Co-twin 1 | DZ | 0.000 | 0.000 | | | 0.000 |
| 68 | Co-twin 2 | DZ | 0.769 | 2.815 | | | 3.086 |
| 70 | Co-twin 1 | DZ | 3.270 | 3.083 | | | |
| 71 | Co-twin 2 | DZ | 0.000 | 0.858 | | | 0.000 |
| 73 | Co-twin 1 | DZ | 0.000 | 2.119 | | | 2.458 |
| 74 | Co-twin 2 | DZ | 3.109 | 3.076 | | | 0.000 |
| 76 | Co-twin 1 | MZ | 0.484 | 2.120 | | | 3.293 |
| 77 | Co-twin 2 | MZ | 0.037 | 1.894 | | | 0.000 |
| 79 | Co-twin 1 | MZ | 0.000 | | | | |
| 80 | Co-twin 2 | MZ | 0.000 | | | | 0.000 |
| 82 | Co-twin 1 | MZ | 0.000 | 0.000 | | | 2.536 |
| 83 | Co-twin 2 | MZ | 0.039 | 0.000 | | | 2.613 |
| 85 | Co-twin 1 | DZ | 0.000 | | | | 0.000 |
| 86 | Co-twin 2 | DZ | 2.995 | | | | 0.000 |
| 88 | Co-twin 1 | DZ | 0.056 | 0.103 | | | 0.000 |
| 89 | Co-twin 2 | DZ | 0.000 | 0.000 | | | 2.700 |
| 91 | Co-twin 1 | MZ | 0.000 | | | | 2.084 |
| 92 | Co-twin 2 | MZ | 0.000 | | | | 0.000 |
| 94 | Co-twin 1 | MZ | 3.212 | 3.159 | | M. smithii | |
| 95 | Co-twin 2 | MZ | 2.793 | 2.442 | | M. smithii | 2.462 |
| 97 | Co-twin 1 | DZ | 0.038 | 0.000 | | | 0.000 |
| 98 | Co-twin 2 | DZ | 0.010 | 0.000 | | | 2.044 |
| 100 | Co-twin 1 | MZ | 1.930 | 1.622 | | | 2.302 |
| 101 | Co-twin 2 | MZ | 3.215 | 0.685 | | | |
| 103 | Co-twin 1 | MZ | 0.080 | 0.000 | | | 0.000 |
| 104 | Co-twin 2 | MZ | 0.036 | 0.000 | | | 0.000 |
| 106 | Co-twin 1 | MZ | 0.000 | | | | 0.000 |
| 107 | Co-twin 2 | MZ | 0.000 | | | | |
| 109 | Co-twin 1 | DZ | 0.078 | | | | 2.006 |
| 110 | Co-twin 2 | DZ | 0.249 | | | | |
| 112 | Co-twin 1 | MZ | 0.000 | | | | 0.000 |
| 113 | Co-twin 2 | MZ | 0.000 | | | | |
| 115 | Co-twin 1 | MZ | 2.381 | 2.860 | | | |
| 116 | Co-twin 2 | MZ | 2.893 | 3.150 | | | |
| 118 | Co-twin 1 | DZ | 0.000 | | | | 0.000 |
| 119 | Co-twin 2 | DZ | 0.909 | | | | |
| 121 | Co-twin 1 | MZ | 0.000 | | | | 2.665 |
| 122 | Co-twin 2 | MZ | 0.000 | | | | |
| 124 | Co-twin 1 | DZ | 0.000 | | | | 3.002 |
| 125 | Co-twin 2 | DZ | 0.000 | | | | 3.133 |
| 127 | Co-twin 1 | DZ | 5.718 | | | M. smithii | |
| 128 | Co-twin 2 | DZ | 0.000 | | | | 0.000 |
| 130 | Co-twin 1 | MZ | 0.000 | | | | 0.000 |
| 131 | Co-twin 2 | MZ | 0.000 | | | | |
| 133 | Co-twin 1 | MZ | 0.000 | | | | |
| 134 | Co-twin 2 | MZ | 0.000 | | | | 0.000 |
| 136 | Co-twin 1 | DZ | 4.761 | | | | |
| 137 | Co-twin 2 | DZ | 0.000 | | | | 2.833 |
| 139 | Co-twin 1 | DZ | 1.890 | | | | |
| 140 | Co-twin 2 | DZ | 2.044 | | | M. smithii | 2.957 |
| 142 | Co-twin 1 | DZ | 0.000 | | | | 3.857 |
| 143 | Co-twin 2 | DZ | 0.221 | | | | 0.000 |
| 145 | Co-twin 1 | DZ | 1.502 | | | M. smithii | 4.191 |
| 146 | Co-twin 2 | DZ | 2.655 | | | M. smithii | 0.000 |
| 148 | Co-twin 1 | MZ | 0.000 | | | | |
| 149 | Co-twin 2 | MZ | 0.000 | | | | |
| 151 | Co-twin 1 | DZ | 0.000 | | | | 0.000 |
| 152 | Co-twin 2 | DZ | 3.004 | | | | 2.942 |
| 154 | Co-twin 1 | MZ | 3.388 | | | M. smithii | 0.000 |
| 155 | Co-twin 2 | MZ | 3.107 | | | M. smithii | 2.221 |
| 157 | Co-twin 1 | DZ | 1.467 | | | | 0.000 |
| 158 | Co-twin 2 | DZ | 0.000 | | | | |
| 160 | Co-twin 1 | DZ | 0.610 | | | | 0.000 |
| 161 | Co-twin 2 | DZ | 0.000 | | | | 0.000 |
| 163 | Co-twin 1 | MZ | 0.000 | | | | 0.000 |
| 164 | Co-twin 2 | MZ | 0.000 | | | | 4.550 |
| 166 | Co-twin 1 | DZ | 1.378 | | | | 0.000 |
| 167 | Co-twin 2 | DZ | 0.000 | | | | 0.000 |
| 169 | Co-twin 1 | DZ | 2.955 | | | | 3.880 |
| 170 | Co-twin 2 | DZ | 0.000 | | | | 0.000 |
| 172 | Co-twin 1 | MZ | 0.000 | | | | 3.416 |
| 173 | Co-twin 2 | MZ | 0.000 | | | | 0.000 |
| 175 | Co-twin 1 | MZ | 0.000 | | | | |
| 176 | Co-twin 2 | MZ | 0.000 | | | | 0.000 |
| 178 | Co-twin 1 | DZ | 0.613 | | | | |
| 179 | Co-twin 2 | DZ | 2.282 | | | | 1.651 |
| 181 | Co-twin 1 | DZ | 0.000 | | | | 2.505 |
| 182 | Co-twin 2 | DZ | 2.430 | | | | 4.587 |
| 184 | Co-twin 1 | MZ | 1.996 | | | | 0.000 |
| 185 | Co-twin 2 | MZ | 0.000 | | | | 0.000 |
| 187 | Co-twin 1 | DZ | 0.000 | | | | |
| 188 | Co-twin 2 | DZ | 0.000 | | | | |
| 190 | Co-twin 1 | MZ | 0.000 | | | | 3.375 |
| 191 | Co-twin 2 | MZ | 0.000 | | | | 0.000 |
| 193 | Co-twin 1 | DZ | 0.000 | | | | 3.233 |
| 194 | Co-twin 2 | DZ | 0.000 | | | | 0.000 |
| 196 | Co-twin 1 | DZ | 0.000 | | | | 2.820 |
| 197 | Co-twin 2 | DZ | 0.000 | | | | 0.000 |
| 199 | Co-twin 1 | DZ | 0.000 | | | | 2.989 |
| 200 | Co-twin 2 | DZ | 0.000 | | | | 0.000 |
| 202 | Co-twin 1 | DZ | 0.000 | | | | |
| 203 | Co-twin 2 | DZ | 0.000 | | | | |
| 205 | Co-twin 1 | DZ | 2.727 | | | | |

qPCR results are shown as log₁₀ (genome equivalents per nanogram of DNA). For mrcA, results in bold are above our threshold for calling a sample “positive”.

TABLE 25
Relative abundance of Desulfovibrio taxa (as defined
by sequencing the V2 regions of their 16S rRNA genes)

| | | | OTUs in lineages related to SRB | | | |
|---|---|---|---|---|---|---|
| | | | log (mcrA) | | | |
| TS# | | zygosity | Taxon 7973 | Taxon 12216 | Taxon 12050 | Taxon 1908 |
| 1 | Co-twin 1 | MZ | 0.000503694 | 0 | 0 | 0 |
| 2 | Co-twin 2 | MZ | 0 | 0 | 0 | 0 |
| 4 | Co-twin 1 | MZ | 0 | 0 | 0 | 0 |
| 5 | Co-twin 2 | MZ | 0 | 0 | 0 | 0 |
| 7 | Co-twin 1 | MZ | 0 | 0.000179469 | 8.97344E−05 | 0 |
| 8 | Co-twin 2 | MZ | 0 | 0.001734713 | 0.001053219 | 0 |
| 10 | Co-twin 1 | MZ | 0 | 0 | 0 | 0 |
| 11 | Co-twin 2 | MZ | 0 | 0 | 0 | 0 |
| 13 | Co-twin 1 | MZ | 0 | 0.001230769 | 0.001107692 | 0 |
| 14 | Co-twin 2 | MZ | 0 | 0.000129266 | 0 | 0 |
| 16 | Co-twin 1 | MZ | 0 | 0 | 0.002105263 | 0 |
| 17 | Co-twin 2 | MZ | 0 | 0 | 0 | 0 |
| 19 | Co-twin 1 | MZ | 0 | 0 | 0 | 0 |
| 20 | Co-twin 2 | MZ | 0 | 0 | 0 | 0 |
| 22 | Co-twin 1 | MZ | 0 | 0 | 0 | 0 |
| 23 | Co-twin 2 | MZ | 0 | 0 | 0 | 0 |
| 25 | Co-twin 1 | MZ | 0 | 0 | 0 | 0 |
| 26 | Co-twin 2 | MZ | 6.27983E−05 | 0 | 0 | 0 |
| 28 | Co-twin 1 | MZ | 0 | 0 | 0 | 0 |
| 29 | Co-twin 2 | MZ | 0 | 0 | 0 | 0 |
| 31 | Co-twin 1 | MZ | 0 | 0 | 0 | 0 |
| 32 | Co-twin 2 | MZ | 0 | 0.001546278 | 0.001546278 | 0 |
| 34 | Co-twin 1 | MZ | 0 | 0 | 0.003594536 | 0 |
| 35 | Co-twin 2 | MZ | 0 | 0 | 0.004326123 | 0 |
| 37 | Co-twin 1 | MZ | 0 | 0 | 0 | 0 |
| 38 | Co-twin 2 | MZ | 0 | 0 | 0 | 0 |
| 40 | Co-twin 1 | MZ | | | | |
| 41 | Co-twin 2 | MZ | | | | |
| 43 | Co-twin 1 | MZ | 0 | 0 | 0 | 0 |
| 44 | Co-twin 2 | MZ | 0 | 0 | 0 | 0 |
| 46 | Co-twin 1 | MZ | | | | |
| 47 | Co-twin 2 | MZ | | | | |
| 49 | Co-twin 1 | MZ | 0 | 0 | 0 | 0 |
| 50 | Co-twin 2 | MZ | 0 | 0 | 0 | 0 |
| 52 | Co-twin 1 | MZ | | | | |
| 53 | Co-twin 2 | MZ | | | | |
| 55 | Co-twin 1 | DZ | 0 | 0 | 0 | 0 |
| 56 | Co-twin 2 | DZ | 0 | 0 | 0 | 0 |
| 58 | Co-twin 1 | MZ | | | | |
| 59 | Co-twin 2 | MZ | | | | |
| 61 | Co-twin 1 | DZ | 0 | 0 | 0 | 0 |
| 62 | Co-twin 2 | DZ | 0 | 0 | 0 | 0 |
| 64 | Co-twin 1 | MZ | 0 | 0 | 0 | 0 |
| 65 | Co-twin 2 | MZ | 0 | 0 | 0 | 0 |
| 67 | Co-twin 1 | DZ | 0 | 0 | 0 | 0 |
| 68 | Co-twin 2 | DZ | 0 | 0 | 0 | 0.001277139 |
| 70 | Co-twin 1 | DZ | 0 | 0 | 0 | 0 |
| 71 | Co-twin 2 | DZ | 0 | 0 | 0 | 0 |
| 73 | Co-twin 1 | DZ | 0 | 0 | 0 | 0 |
| 74 | Co-twin 2 | DZ | 0 | 0 | 0 | 0 |
| 76 | Co-twin 1 | MZ | 0 | 0 | 0 | 0.000676361 |
| 77 | Co-twin 2 | MZ | 0 | 0 | 0 | 0 |
| 79 | Co-twin 1 | MZ | | | | |
| 80 | Co-twin 2 | MZ | | | | |
| 82 | Co-twin 1 | MZ | 0 | 0 | 0 | 0 |
| 83 | Co-twin 2 | MZ | 0 | 0 | 0.000645161 | 0 |
| 85 | Co-twin 1 | DZ | 0 | 0 | 0 | 0 |
| 86 | Co-twin 2 | DZ | 0 | 0 | 0 | 0 |
| 88 | Co-twin 1 | DZ | 0 | 0 | 0 | 0 |
| 89 | Co-twin 2 | DZ | 0 | 0 | 0 | 0.000959233 |
| 91 | Co-twin 1 | MZ | 0 | 0 | 0 | 0 |
| 92 | Co-twin 2 | MZ | 0 | 0 | 0 | 0 |
| 94 | Co-twin 1 | MZ | 0 | 0 | 0 | 0.008077544 |
| 95 | Co-twin 2 | MZ | 0 | 0 | 0 | 0.011243851 |
| 97 | Co-twin 1 | DZ | 0 | 0 | 0 | 0 |
| 98 | Co-twin 2 | DZ | 0 | 0 | 0 | 0 |
| 100 | Co-twin 1 | MZ | 0 | 0 | 0 | 0 |
| 101 | Co-twin 2 | MZ | | | | |
| 103 | Co-twin 1 | MZ | 0 | 0 | 0 | 0 |
| 104 | Co-twin 2 | MZ | 0 | 0 | 0 | 0 |
| 106 | Co-twin 1 | MZ | 0 | 0 | 0 | 0 |
| 107 | Co-twin 2 | MZ | 0 | 0 | 0 | 0 |
| 109 | Co-twin 1 | DZ | 0 | 0 | 0.002912621 | 0 |
| 110 | Co-twin 2 | DZ | 0 | 0 | 0 | 0 |
| 112 | Co-twin 1 | MZ | | | | |
| 113 | Co-twin 2 | MZ | | | | |
| 115 | Co-twin 1 | MZ | 0 | 0 | 0 | 0.002368733 |
| 116 | Co-twin 2 | MZ | 0 | 0 | 0.003847563 | 0.001832173 |
| 118 | Co-twin 1 | DZ | 0 | 0 | 0 | 0 |
| 119 | Co-twin 2 | DZ | 0 | 0 | 0 | 0 |
| 121 | Co-twin 1 | MZ | | | | |
| 122 | Co-twin 2 | MZ | | | | |
| 124 | Co-twin 1 | DZ | 0 | 0 | 0 | 0 |
| 125 | Co-twin 2 | DZ | 0 | 0 | 0.00084317 | 0 |
| 127 | Co-twin 1 | DZ | 0.000312305 | 0 | 0 | 0 |
| 128 | Co-twin 2 | DZ | 0 | 0 | 0 | 0 |
| 130 | Co-twin 1 | MZ | 0 | 0 | 0 | 0 |
| 131 | Co-twin 2 | MZ | 0 | 0 | 0 | 0 |
| 133 | Co-twin 1 | MZ | 0 | 0 | 0 | 0 |
| 134 | Co-twin 2 | MZ | 0 | 0 | 0 | 0 |
| 136 | Co-twin 1 | DZ | 0 | 0 | 0 | 0.003103448 |
| 137 | Co-twin 2 | DZ | 0 | 0 | 0.001086957 | 0 |
| 139 | Co-twin 1 | DZ | 0 | 0 | 0.000363504 | 0 |
| 140 | Co-twin 2 | DZ | 0 | 0 | 0.002235469 | 0.002980626 |
| 142 | Co-twin 1 | DZ | 0 | 0 | 0 | 0 |
| 143 | Co-twin 2 | DZ | 0 | 0 | 0 | 0 |
| 145 | Co-twin 1 | DZ | 0 | 0 | 0 | 0 |
| 146 | Co-twin 2 | DZ | 0 | 0 | 0 | 0 |
| 148 | Co-twin 1 | MZ | 0 | 0.001706193 | 0.001023716 | 0 |
| 149 | Co-twin 2 | MZ | 0 | 0 | 0 | 0 |
| 151 | Co-twin 1 | DZ | 0 | 0 | 0 | 0 |
| 152 | Co-twin 2 | DZ | 0 | 0 | 0 | 0 |
| 154 | Co-twin 1 | MZ | | | | |
| 155 | Co-twin 2 | MZ | 0 | 0 | 0 | 0 |
| 157 | Co-twin 1 | DZ | | | | |
| 158 | Co-twin 2 | DZ | | | | |
| 160 | Co-twin 1 | DZ | 0 | 0 | 0.001730104 | 0 |
| 161 | Co-twin 2 | DZ | 0 | 0 | 0 | 0 |
| 163 | Co-twin 1 | MZ | 0 | 0 | 0 | 0 |
| 164 | Co-twin 2 | MZ | 0 | 0 | 0 | 0 |
| 166 | Co-twin 1 | DZ | 0 | 0 | 0 | 0 |
| 167 | Co-twin 2 | DZ | 0 | 0 | 0 | 0 |
| 169 | Co-twin 1 | DZ | 0 | 0 | 0 | 0.000481696 |
| 170 | Co-twin 2 | DZ | 0 | 0 | 0 | 0 |
| 172 | Co-twin 1 | MZ | | | | |
| 173 | Co-twin 2 | MZ | | | | |
| 175 | Co-twin 1 | MZ | | | | |
| 176 | Co-twin 2 | MZ | | | | |
| 178 | Co-twin 1 | DZ | 0 | 0 | 0 | 0 |
| 179 | Co-twin 2 | DZ | 0 | 0 | 0 | 0 |
| 181 | Co-twin 1 | DZ | 0 | 0 | 0 | 0 |
| 182 | Co-twin 2 | DZ | 0 | 0 | 0 | 0.012687428 |
| 184 | Co-twin 1 | MZ | 0 | 0 | 0 | 0 |
| 185 | Co-twin 2 | MZ | 0 | 0 | 0 | 0 |
| 187 | Co-twin 1 | DZ | | | | |
| 188 | Co-twin 2 | DZ | | | | |
| 190 | Co-twin 1 | MZ | 0 | 0 | 0 | 0.000644122 |
| 191 | Co-twin 2 | MZ | 0 | 0 | 0 | 0 |
| 193 | Co-twin 1 | DZ | 0 | 0 | 0.002008032 | 0 |
| 194 | Co-twin 2 | DZ | 0 | 0 | 0 | 0 |
| 196 | Co-twin 1 | DZ | | | | |
| 197 | Co-twin 2 | DZ | | | | |
| 199 | Co-twin 1 | DZ | | | | |
| 200 | Co-twin 2 | DZ | | | | |
| 202 | Co-twin 1 | DZ | | | | |
| 203 | Co-twin 2 | DZ | | | | |

### Example 8

### Co-Occurance Between M. smithii and Bacterial Taxa

[0193] The qPCR results suggest that host genetic factors, including factors that influence the representation of potential syntrophic partners, may play a role in carriage of methanogens. In contrast, the study of Florin et al. (17), which used methane breath tests, showed no significant differences in concordance between young adolescent Australian MZ and DZ twin pairs. The difference could be explained if environmental factors play a dominant role in determining whether methanogens are acquired early in life, whereas persistent carriage in later life is determined by a variety of host factors. Such factors range from human genotype to the presence or absence of bacterial taxa that can collaborate or compete with the methanogens.

[0194] A role for host factors in determining carriage of methanogens is supported by previous studies of nonhuman primates. Methanogens were present in the gut microbiota of some primate phylogenetic lineages but not others; however, these patterns did not follow any identifiable features of gut physiology or morphology, nor behavior or diet (20). Another study that examined the distribution of methanogens within the guts of 253 vertebrate species found “methanogenic branches” of the host phylogenetic tree [i.e., branches containing ruminants (bovidae, cervidae, giraffidae) and “nonmethanogenic” branches (felidae, canidae, and ursidae)]. As with the primate study, the methane-producing groups could not be distinguished from the methane-negative groups based on their diets or features of their gut structure/physiology (21).

[0195] To understand whether methanogen carriage might be determined, in part, by the presence or absence of bacterial taxa that can collaborate or compete with the methanogens, the co-occurrence patterns between methanogens and sulfate-reducing bacteria (SRB) was investigated. SRB, which can use H₂ as an electron donor to generate hydrogen sulfide (H₂S) through anaerobic sulfate respiration, may show positive associations with methanogens if a hydrogen economy is more important in some individuals than others, or negative associations due to competition for H₂. Positive associations between SRB and methanogens might also occur because of syntrophy, because some methanogens and SRB can grow syntrophically on lactate, with the methanogen removing H₂ generated by the SRB (22, 23). Therefore, it was determined whether SRB and methanogens had nonrandom codistribution patterns by SRB-directed qPCR assays of 87 fecal samples from the MZ and DZ twin pairs. The aps gene encodes adenosine-5′-phosphosulfate reductase, a key enzyme that catalyzes activation and then reduction of sulfate to sulfite (24). We chose aps as a target for a qPCR assay that used previously described and validated primers (25). Forty-five percent of the samples were positive for SRB (threshold of detection defined as ≈4×10⁷ genome equivalents per mg of fecal DNA). The concordance rate for sulfate reducers was not significant for either MZ or DZ co-twins (31% and 27%, Tables 24 and 25). A logistic regression was performed to determine whether a higher level of mcrA is predictive of the presence of aps or vice versa. No statistically significant relationship was identified in either comparison (P=0.10 and 0.07).

[0196] A general search for bacterial Operational Taxonomic Units (OTUs) that had positive or negative associations with M. smithii was also performed, using sequences generated from multiplex pyrosequencing of the V2 variable region of bacterial 16S rRNA genes from these same fecal samples (2). The raw sequences from this prior study were now processed by using the PyroNoise algorithm to remove sequencing noise (26), as implemented in QIIME (27). Using UCLUST (28), the denoised sequences were further divided into OTUs that each shared ≧96% nucleotide sequence identity (a value slightly more permissive than the 97% ID threshold typically used to denote a microbial species). The most abundant sequence within each of the resulting 12,833 OTUs was then selected as a representative of that OTU. Because some of the individuals in the study were sampled multiple times, one sample per individual was randomly selected. For each of the 607 OTUs that were found in at least 10 of the samples for which there was mcrA qPCR data, an ANOVA was performed to determine whether the OTU relative abundance was significantly different in methanogen-positive and -negative individuals. Associated presence/absence patterns were also checked for by using the G-test of independence (an OTU was scored as present if it was observed one or more times). The resulting P values were corrected for multiple comparisons by using the Bonferroni correction (multiplied by 607; the number of comparisons) and the false discovery rate (FDR) method (multiplied by the number of comparisons divided by the P value rank).

[0197] Twenty-two OTUs had significantly different relative abundances in mcrA-positive versus negative individuals (P<0.05 using ANOVA with the FDR correction). Of these 22 OTUs, 21 were more abundant in samples where methanogens were present, whereas one OTU was less abundant. The G-test identified five significant OTUs (P<0.05 with FDR correction), and 4 of these 5 were also significant as judged by ANOVA. All G-test-identified associations were positive. Thus, the two statistical tests together identified 22 positively associated OTUs (Table 26) and one negatively associated OTU.

[0198] To investigate the phylogenetic relationships of these OTUs to each other, and to bacterial isolates and lineages with known biological properties, parsimony insertion was used to add a representative sequence for each significant OTU into the Greengenes coreset tree (29) in the Arb software package (30). Because the closest relatives of the OTUs were mostly from other culture-independent metagenomic studies, 16S rRNA sequences were also inserted into the tree that were from well-characterized bacteria, including 16S rRNAs from fully sequenced genomes deposited in KEGG or sequenced through the Human Gut Microbiome Initiative (HGMI; http://genome.wustl.edu/genomes/list/human_gut_microbiome/), and 16S rRNA sequences from related organisms with known properties that were identified by using BLAST searches against the National Center for Biotechnology Information nonredundant database. To look for evidence of whether relatives of the OTUs were capable of growing in pure culture, the 16S rRNA sequences were also BLASTed against sequences in the RDP (31) that were marked as being from cultured bacterial isolates.

[0199] Remarkably, 20 of the 22 positively associated OTUs were members of the class Clostridiales (Firmicutes phylum). These 20 OTUs binned into five broad groups that were scattered throughout the class, including members of the three main clusters found in the human gut (clusters I, IV, and XIVa).

[0200] The group most positively associated with M. smithii was a lineage within Clostridia cluster IV that contains members of the genera Oscillospira and Sporobacter (Table 26; note that this group had the four most significant OTUs according to the ANOVA test). Two of these OTUs are highly related to Oscillospira guilliermondii, an as yet uncultured, large, and morphologically conspicuous organism found in ruminants (32, 33). The most closely related cultured isolate that we could find for any of these OTUs is Sporobacter termitidis, a hydrogen-consuming acetogen from the termite gut (34).

[0201] Two of the positively associated OTUs are members of Clostridia cluster

[0202] XIVa. The closest isolate with a sequenced genome was Blautia hydrogenotrophica, a hydrogen-consuming homoacetogen from the human gut, although the percent identity across the lanemasked V2 region was low (89-93%) and more closely related organisms to B. hydrogenotrophica are known not to be acetogens. Whether the Sporobacter and B. hydrogenotrophica-related OTUs are acetogens cannot be determined by using 16S rRNA sequences alone, because acetogenesis is only inconsistently associated with 16S rRNA-defined phylotypes (35). However, the relationship suggests that some OTUs may co-occur with methanogens because they are homoacetogens and have a shared preference for hydrogen. Nonetheless, the OTU most related to B. hydrogenotrophica in this analysis (99% ID) did not show significant co-occurrence with M. smithii (uncorrected P value=0.38), indicating that not all homoacetogens in the human co-occur with M. smithii because of this preference for hydrogen.

[0203] Because members of the SRB can produce and consume H₂, OTUs in the dataset that were in this group were of specific interest. Eighty-two of 281 fecal samples (29%) from the 16S rRNA analysis of these twin pairs (including additional fecal samples for which we did not obtain mcrA data) (2) had OTUs that were within the SRB Glade (FIG. 19B). The actual prevalence of SRB is likely higher, because the samples were not exhaustively sequenced. Phylogenetic comparison indicated that these OTUs represented Desulfovibrio piger in 41 (14.6%) of the samples, Desulfovibrio desulfuricans in 10 samples (3.6%), and an additional taxon (1908) in 38 samples (13.5%) that was only distantly related to cultured isolates (Table 26 and FIG. 19). Although significant associations were not detected with the SRB-specific qPCR, OTU 1908 showed a significantly positive association with methanogens (Table 26). The abundant OTU representing D. piger (OTU 12050) did not have statistically significant co-occurrence with methanogens (FIG. 19), and the three different types of SRB did not significantly co-occur with each other. The differing distribution patterns of the three different SRB species, coupled with the smaller number of fecal samples for which we had aps compared with mcrA qPCR data, likely contributed to our inability to detect a significant association between methanogens and SRB with the aps qPCR assay.

[0204] The concentration of H₂ in the gut lumen can vary over a wide range in healthy individuals (from 0.17% to 49% in a study of 11 subjects; ref. 36). Levels of H₂ in the distal gut reflect the dynamic interplay between microbial production and consumption. One of the co-occurring groups within the Clostridiales may produce abundant amounts of hydrogen. Specifically, two of the positively associated OTUs in the Clostridiales family mapped to a Glade that included isolate Rennanqilyf3, which was recovered from activated sludge by using a procedure designed to retrieve bacteria with particularly high yields of hydrogen (37). This isolate performs ethanol-type fermentation with glucose as an optimal carbon source for hydrogen production; however, its hydrogen production capacity varies with hydrogen concentration and pH. Thus, methanogen (M. smithii) abundance may be in part regulated by the presence of bacterial lineages that are efficient hydrogen producers. To our knowledge, no cultured isolates are available for members of this lineage from the gut.

[0205] Some of the OTUs that are positively associated with methanogens are quite distant from any cultured relatives (ribotypes): This observation is intriguing, because it suggests that syntrophic relationships may inhibit them from growing in monoculture. For example, four OTUs grouped in a Glade of the Clostridiales family that is dominated by relatives identified in culture-independent studies of cellulose-degrading gut environments where methanogens also reside (e.g., termite gut and cow rumen) (Gut Clone Group; Table 26 and FIG. 19A). The closest organism with a sequenced genome was only very distantly related, with a 78-86% ID over the lanemasked V2 region of rRNA. A BLAST search against the cultured component of the RDP revealed one successful attempt to culture a relative of one of these four OTUs (95% ID) from the forestomach of the kangaroo (38). However, this cultured isolate was much more distant from the other three co-occurring OTUs in this Glade, and there are no reported cultured relatives for any of these four OTUs from the human gut. Three co-occurring OTUs fell within the Catabacter lineage. The closest cultured isolate, Catabacter sp. YIT12065, is only 82-92% identical to these co-occurring OTUs; very little is known about this isolate's biology. The presence of obligate syntrophs for methanogens in the human gut would not be surprising, because they are known to exist in other environments, such as sludge (39, 40).

[0206] Unfortunately, the lack of cultured relatives for these OTUs limits the ability to more fully interpret the co-occurrence results, because knowledge is lacking about their biological properties. Targeted attempts to culture gut bacteria in the presence of M. smithii as well as targeted attempts to obtain and sequence their genomes from mixed populations should help to elucidate their functional relationships with human gut methanogens.

TABLE 26
Bacterial taxa that co-occur with methanogens

| | Related bacteria | ANOVA p-value | | | G-test p-value | | | |
|---|---|---|---|---|---|---|---|---|
| OTU # | (% identity) | Raw | Bonferroni | fdr | Raw | Bonferroni | fdr | rank |

Delta Proteobacteria; Desulfovibrio;

| | | | | | | | |
|---|---|---|---|---|---|---|---|
| 1908 | D. piger (87.4) | 4.07E−04 | 2.47E−01 | 2.24E−02 | NS | NS | 11 |
| | D. desulfuricans (90) | | | | | | |

Bacteroidetes; Alistipes;

| | | | | | | | |
|---|---|---|---|---|---|---|---|
| 4544 | Alistipes putridinis (91.6) | 7.10E−04 | 4.31E−01 | 2.87E−02 | NS | NS | 15 |

Firmicutes; Clostridiales; Cluster IV; Sporobacter/Oscillospira;

| | | | | | | | | |
|---|---|---|---|---|---|---|---|---|
| 994 | Oscillospira guilliermondi | 3.07E−06 | 1.86E−03 | 1.86E−03 | 7.48E−05 | 4.54E−02 | 2.27E−02 | 1 |
| | (94) | | | | | | | |
| | Sporobacter termitidis (89) | | | | | | | |
| 7178 | Oscillospira guilliermondi | 1.80E−05 | 1.09E−02 | 5.45E−03 | | NS | NS | 2 |
| | (95.6) | | | | | | | |
| | Sporobacter termitidis | | | | | | | |
| | (89.5) | | | | | | | |
| 11076 | Oscillospira guilliermondi | 4.12E−05 | 2.50E−02 | 8.33E−03 | | NS | NS | 3 |
| | (96) | | | | | | | |
| | Sporobacter termitidis | | | | | | | |
| | (89.7) | | | | | | | |
| 12187 | Oscillospira guilliermondi | 5.46E−05 | 3.32E−02 | 8.29E−03 | 7.55E−05 | 4.58E−02 | 1.53E−02 | 4 |
| | (93) | | | | | | | |
| | Sporobacter termitidis (93) | | | | | | | |
| 10817 | Oscillospira guilliermondi | 9.70E−04 | 5.89E−01 | 3.10E−02 | | NS | NS | 19 |
| | (89) | | | | | | | |
| | Sporobacter termitidis | | | | | | | |
| | (88.5) | | | | | | | |
| 10188 | Oscillospira guilliermondi | 1.06E−03 | 6.43E−01 | 3.22E−02 | 2.44E−04 | 1.48E−01 | 2.96E−02 | 20 |
| | (92.6) | | | | | | | |
| | Sporobacter termitidis (88) | | | | | | | |

Firmicutes; Clostridiales; Cluster IV; Rennanqily;

| | | | | | | | | |
|---|---|---|---|---|---|---|---|---|
| 10297 | Rennanqilyf3_AY363375 | 2.82E−04 | 1.71E−01 | 2.14E−02 | | NS | NS | 8 |
| | (91.9) | | | | | | | |
| 10741 | Rennanqilyf3_AY363375 | 3.03E−04 | 1.84E−01 | 2.05E−02 | 2.28E−04 | 1.39E−01 | 3.46E−02 | 9 |
| | (87) | | | | | | | |

Firmicutes; Clostridiales; Cluster IV; Anaerotruncus;

| | | | | | | | |
|---|---|---|---|---|---|---|---|
| 10014 | Clostridium methylpentosum | 2.07E−04 | 1.26E−01 | 1.79E−02 | NS | NS | 7 |
| | (92) | | | | | | |
| | Anaerotruncus colihominis | | | | | | |
| | (91) | | | | | | |
| 8310 | Clostridium methylpentosum | 6.13E−04 | 3.72E−01 | 2.86E−02 | NS | NS | 13 |
| | (92.6) | | | | | | |
| | Anaerotruncus colihominis | | | | | | |
| | (92) | | | | | | |

Firmicutes; Clostridiales; Catabacter;

| | | | | | | | | |
|---|---|---|---|---|---|---|---|---|
| 3231 | Catabacter sp. YIT12065 | 1.48E−04 | 8.98E−02 | 1.80E−02 | | NS | NS | 5 |
| | AB490809 (85) | | | | | | | |
| 6560 | Catabacter sp. YIT12065 | 1.56E−04 | 9.46E−02 | 0.016 | | NS | NS | 6 |
| | AB490809 (92) | | | | | | | |
| 4838 | Catabacter sp. YIT12065 | 9.07E−03 | 5.50E+00 | 1.34E−01 | 6.71E−05 | 4.07E−02 | 4.07E−02 | 41 |
| | AB490809 (81.9) | | | | | | | |

Firmicutes; Clostridiales; Cluster I; Gut Clone Group;

| | | | | | | | |
|---|---|---|---|---|---|---|---|
| 3247 | Clostridium cellulovorans | 3.13E−04 | 1.90E−01 | 1.90E−02 | NS | NS | 10 |
| | (83.3) | | | | | | |
| | Kangaroo forestomach | | | | | | |
| | isolate YE57 AY442821 | | | | | | |
| | (86.5) | | | | | | |
| 7622 | Clostridium cellulovorans | 7.32E−04 | 4.44E−01 | 2.78E−02 | NS | NS | 16 |
| | (85.7) | | | | | | |
| | Kangaroo forestomach | | | | | | |
| | isolate YE57 AY442821 | | | | | | |
| | (83.5) | | | | | | |
| 9347 | Clostridium cellulovorans | 9.21E−04 | 5.59E−01 | 3.11E−02 | NS | NS | 18 |
| | (81.7) | | | | | | |
| | Kangaroo forestomach | | | | | | |
| | isolate YE57 AY442821 | | | | | | |
| | (83) | | | | | | |
| 8770 | Clostridium cellulovorans | 1.41E−03 | 8.59E−01 | 4.10E−02 | NS | NS | 21 |
| | (78.4) | | | | | | |
| | Kangaroo forestomach | | | | | | |
| | isolate YE57 AY442821 | | | | | | |
| | (94.9) | | | | | | |

Firmicutes; Clostridiales; Cluster XIVa;

| | | | | | | | |
|---|---|---|---|---|---|---|---|
| 2502 | Blautia hydrogenotrophica | 6.37E−04 | 3.87E−01 | 2.76E−02 | NS | NS | 14 |
| | (92.5) | | | | | | |
| 4531 | Blautia hydrogenotrophica | 1.75E−03 | 1.06E+00 | 4.82E−02 | NS | NS | 22 |
| | (89) | | | | | | |
| 4683 | Coprococcus eutactus | 7.72E−04 | 4.69E−01 | 2.76E−02 | NS | NS | 17 |
| | (98.9) | | | | | | |

OTUs found to be significantly co-occurring with methanogens are shown, together with information about their phylogeny, the percent identity of the V2 regions of their 16S rRNA gene sequence with previously described related bacterial taxa, a P value for co-occurrence as defined by ANOVA, and corrected for multiple hypothesis testing (false discovery rate correction). Significant P values are noted in red, whereas insignificant values are shown in black or denoted with “NS.” The rank is for the ANOVA P values. G-test P values are only given for the ones that were significant after applying the FDR correction. Related isolates are followed by their percent nucleotide sequence identity (% ID) to the listed organism over the V2 region of their 16S rRNA genes (after the Lane mask for hypervariable positions was applied).

### Example 9

### Analysis of the Pan-Genome of M. smithii

[0207] It was reasoned that one approach for further characterizing factors that affect M. smithii colonization of the human gut would be to develop a method for isolating strains from frozen fecal samples obtained from twins and their mothers, sequencing their genomes, and performing RNA-Seq to evaluate strain-level variations in patterns of gene expression during growth under varying levels of hydrogen and formate.

[0208] The method that was developed for recovering M. smithii from frozen fecal samples is described above. A total of 20 strains were isolated from two families: one consisting of a MZ twin pair and their mother and the other a DZ twin pair and their mother (n=2-5 strains isolated and sequenced per individual). Deep draft genome assemblies were generated by using reads produced by Illumina GA-IIx and 454 sequencers. Table 23 describes the details of genome coverage and of the assembly statistics. Assembled genomes were aligned by using Mauve (41), which iteratively reordered contigs based on the finished genome sequence of the M. smithii type strain PS (42). Table 23 also provides information about previously generated, deep draft assemblies of the genomes of two other M. smithii type strains obtained from culture collections (42).

[0209] On average, any two strains shared 92.96±6.5% of their single nucleotide polymorphisms (SNPs) [129,112±6,322 (mean±SD)]. A binary table of the presence or absence of a SNP was subsequently generated, a distance matrix was calculated, and a principal components analysis (PCA) was performed (FIGS. 17A and C). The PCA showed that strains from the same individual and strains from co-twins clustered together. Both MZ and DZ co-twins shared significantly more SNPs in their strains than with strains from their mothers or unrelated individuals (FIG. 17B).

[0210] Genes were identified by using Glimmer (v3.02) trained on contigs >500 bp in each of the 20 sequenced M. smithii isolate genomes, plus the PS type strain and the two other M. smithii isolates we had sequenced. Genes in all 23 genomes were binned by using the program CD-HIT and its default parameters (>90% nucleotide sequence identity over of the length of the shorter gene in each pairwise comparison; FIG. 21) into “operational gene units” (OGUs), a term used in a way that is analogous to OTUs. If any predicted gene from an assembled genome was present in a given OGU bin, that OGU was called “present” within that genome (43). Functions were assigned to predicted proteins encoded by each gene by using the KEGG and STRING databases; Pfam and TIGRFAM annotations were also made. Note that all predicted protein-coding sequences <300 nt were filtered out and not considered in the analyses reported below.

[0211] Rarefaction analysis to determine the rate at which sequencing the genes of new strains revealed new OGUs showed that the number of new or unique OGUs identified begins to plateau by the time≈6 strains were sequenced (≈10,000 genes) (FIGS. 22 A and B). A total of 987 OGUs were present in all 23 strains (34.7% of 2,847 identified OGUs), whereas 1,532 (53.8%) were found in more than one strain but not all, and 328 (11.5%) in only a single strain (FIGS. 21A and B).

[0212] PCA of OGU assignments showed clustering of strains based on family of origin: Strains from MZ family members (TS94-96) generally clustered together, whereas strains from the DZ family (TS145-147) split into two groups (FIG. 21C). Further pairwise comparisons of the degree of sharing of OGUs in strains showed that strains within an individual and within MZ and DZ co-twins shared significantly more OGUs than strains from the co-twin's mother or from unrelated individuals. Moreover, the degree of sharing of OGUs was not significantly different between MZ and DZ twin pairs (FIG. 21D). As noted above, MZ twins have greater concordance for carriage and levels of methanogens in their fecal microbiota than DZ twins. The fact that the sequenced strains are no more similar between MZ co-twins than DZ twins suggests that although shared environmental exposures to methanogens direct which strains are found in an individual's gut, long-term persistence is influenced by a combination of host and microbial genetic factors.

[0213] KEGG was used to assign enzyme commission (EC) numbers to genes in all of the isolates' genomes. A total of 412 ECs were identified: 349 were shared by all strains, 63 were variably represented, and 18 had significant differences in their representation between strains as judged by binomial test (FIG. 23D-E). These discriminatory ECs include (i) several restriction enzymes, (ii) two peptidases [a serine protease known as Do, HtrA, or DegP (44) that may protect against heat-stress and unfolded proteins and endopeptidase La (45)], both of which may be related to quality control in protein folding, and (iii) tRNA-guanine transglycosylases (involved in the anti-codon modification of tRNAs specific for Asn, Asp, His, and Tyr) (FIG. 23 B-E).

[0214] Genes assigned to COG M (cell envelope biogenesis/outer membrane) were prominently represented in the variable component of the pan-genome (FIG. 23A). Variability in surface proteins may directly impact the fitness of M. smithii strains in vivo, including their ability to adhere to host structures, or to interact with syntrophic partners. For example, all of the M. smithii strains contain the six genes involved in synthesis of pseudaminic acid structures related to sialic acid molecules expressed on host cell surfaces. The resulting surface epitopes are thought to play a role in the adaptation of M. smithii to the gut environment by mimicking the sialic acids that decorate the surfaces of host epithelial cells (46). Adhesin-like proteins (ALPs) are a novel class of proteins with homology to bacterial adhesins that were first identified in the M. smithii type strain. They are also hypothesized to play a role in adaptation to the gut environment (42). The 23 sequenced strains contain a total of 101 ALP OGUs (average 45±6 ALP genes per strain). Only six were present in all strains. ALP sequences are quite divergent in terms of their domain structure: e.g., many have intimin domains, which in Escherichia coli mediate binding to intestinal epithelial cells; others have pectate lyase domains and/or parallel β-helix repeats that are often found in enzymes with polysaccharide substrates. Tables 33 and B-D summarize the ALP data.

[0215] To better understand genomic differences among M. smithii strains, the M. smithii pan-genome was searched for evidence of horizontal gene transfer (HGT). The results, described below in Example 11 and summarized in Table 27, show that HGT has contributed to both the core and variable elements of the M. smithii pan-genome. They include core genes involved in methanogenesis and folate biosynthesis; e.g., both compositional- and phylogenetic-based methods revealed transfer of genes encoding THMP methyltransferase C subunit (EC 2.1.1.86), formate dehydrogenase (EC 1.2.1.2), and formylmethanofuran dehydrogenase subunit F (E.C. 1.2.99.5) (Table 28). Note that the early steps in synthesis of methanopterin, a C1 carrier coenzyme involved in the methanogenesis pathway (FIG. 24), are the same as those used for generation of folate (Table 28). In addition, between 52% and 65% ALPs show evidence of transfer: Large-scale HGT of ALPs would be consistent with their variability among strains (Table 20).

TABLE 27
Distribution of HGT genes in the core, variable
and pan-genome by detection method.

| | Variable Genome | | Core Genome | |
|---|---|---|---|---|
| Category* | Genes | % | Genes | % |
| Codons | 2695 | 67.8% | 1278 | 32.2% |
| Codons (with KO mappings) | 816 | 46.6% | 935 | 53.4% |
| Dinuc 3-1 | 2858 | 68.0% | 1342 | 32.0% |
| Dinuc 3-1 (with KO mappings) | 756 | 42.5% | 1023 | 57.5% |
| K-words order 5 | 1386 | 59.3% | 950 | 40.7% |
| K-words order 5 (with KO | 418 | 32.2% | 879 | 67.8% |
| mappings) | | | | |
| PhyloNet | 1333 | 26.0% | 3790 | 73.4% |
| PhyloNet and codons | 174 | 54.5% | 145 | 45.5% |
| PhyloNet and dinuc 3-1 | 146 | 45.9% | 172 | 54.1% |
| PhyloNet and kwords order 5 | 114 | 40.7% | 166 | 59.3% |
| Phage | 17 | 10.9% | 139 | 89.1% |

*Categories listed as ‘with KO mappings’ represent the subset of the pan-genome that could be mapped to KEGG orthology groups.

TABLE 28
Genes involved in methane metabolism and folate biosynthesis that show evidence of HGT

| Analyses used | GENE_ID | KO_ID |
|---|---|---|
| PhyloNet and codon_usage_G_score_rank_order_threshold | METSMIALI_0037 | K00205 |
| PhyloNet and codon_usage_G_score_rank_order_threshold | METSMIALI_0955 | K00205 |
| PhyloNet and codon_usage_G_score_rank_order_threshold | METSMIF1_0715 | K00205 |
| PhyloNet and codon_usage_G_score_rank_order_threshold | METSMIF1_1646 | K00205 |
| PhyloNet and codon_usage_G_score_rank_order_threshold | METSMITS145A_0445 | K00205 |
| PhyloNet and codon_usage_G_score_rank_order_threshold | METSMITS145A_1154 | K00205 |
| PhyloNet and codon_usage_G_score_rank_order_threshold | METSMITS145A_1594 | K00205 |
| PhyloNet and codon_usage_G_score_rank_order_threshold | METSMITS145B_0331 | K00205 |
| PhyloNet and codon_usage_G_score_rank_order_threshold | METSMITS145B_0824 | K00205 |
| PhyloNet and codon_usage_G_score_rank_order_threshold | METSMITS145B_1389 | K00205 |
| PhyloNet and codon_usage_G_score_rank_order_threshold | METSMITS146A_0513 | K00205 |
| PhyloNet and codon_usage_G_score_rank_order_threshold | METSMITS146A_0828 | K00205 |
| PhyloNet and codon_usage_G_score_rank_order_threshold | METSMITS146A_1220 | K00205 |
| PhyloNet and codon_usage_G_score_rank_order_threshold | METSMITS146B_0324 | K00205 |
| PhyloNet and codon_usage_G_score_rank_order_threshold | METSMITS146B_0819 | K00205 |
| PhyloNet and codon_usage_G_score_rank_order_threshold | METSMITS146B_1209 | K00205 |
| PhyloNet and codon_usage_G_score_rank_order_threshold | METSMITS146C_0709 | K00205 |
| PhyloNet and codon_usage_G_score_rank_order_threshold | METSMITS146C_1260 | K00205 |
| PhyloNet and codon_usage_G_score_rank_order_threshold | METSMITS146D_0301 | K08264 |
| PhyloNet and codon_usage_G_score_rank_order_threshold | METSMITS146D_0713 | K00205 |
| PhyloNet and codon_usage_G_score_rank_order_threshold | METSMITS146D_1094 | K00205 |
| PhyloNet and codon_usage_G_score_rank_order_threshold | METSMITS146E_0322 | K00205 |
| PhyloNet and codon_usage_G_score_rank_order_threshold | METSMITS146E_1157 | K00205 |
| PhyloNet and codon_usage_G_score_rank_order_threshold | METSMITS146E_1543 | K00205 |
| PhyloNet and codon_usage_G_score_rank_order_threshold | METSMITS147A_0308 | K00205 |
| PhyloNet and codon_usage_G_score_rank_order_threshold | METSMITS147A_1146 | K00205 |
| PhyloNet and codon_usage_G_score_rank_order_threshold | METSMITS147A_1579 | K00205 |
| PhyloNet and codon_usage_G_score_rank_order_threshold | METSMITS147B_0324 | K00205 |
| PhyloNet and codon_usage_G_score_rank_order_threshold | METSMITS147B_1201 | K00205 |
| PhyloNet and codon_usage_G_score_rank_order_threshold | METSMITS147B_1635 | K00205 |
| PhyloNet and codon_usage_G_score_rank_order_threshold | METSMITS147C_0335 | K00205 |
| PhyloNet and codon_usage_G_score_rank_order_threshold | METSMITS147C_1084 | K00205 |
| PhyloNet and codon_usage_G_score_rank_order_threshold | METSMITS147C_1668 | K00205 |
| PhyloNet and codon_usage_G_score_rank_order_threshold | METSMITS94A_0260 | K00205 |
| PhyloNet and codon_usage_G_score_rank_order_threshold | METSMITS94A_1080 | K00205 |
| PhyloNet and codon_usage_G_score_rank_order_threshold | METSMITS94B_0260 | K00205 |
| PhyloNet and codon_usage_G_score_rank_order_threshold | METSMITS94B_1083 | K00205 |
| PhyloNet and codon_usage_G_score_rank_order_threshold | METSMITS94B_1486 | K00205 |
| PhyloNet and codon_usage_G_score_rank_order_threshold | METSMITS94C_0268 | K00205 |
| PhyloNet and codon_usage_G_score_rank_order_threshold | METSMITS94C_1067 | K00205 |
| PhyloNet and codon_usage_G_score_rank_order_threshold | METSMITS94C_1473 | K00205 |
| PhyloNet and codon_usage_G_score_rank_order_threshold | METSMITS95A_0364 | K00205 |
| PhyloNet and codon_usage_G_score_rank_order_threshold | METSMITS95A_1143 | K00205 |
| PhyloNet and codon_usage_G_score_rank_order_threshold | METSMITS95A_1614 | K00205 |
| PhyloNet and codon_usage_G_score_rank_order_threshold | METSMITS95B_0355 | K00205 |
| PhyloNet and codon_usage_G_score_rank_order_threshold | METSMITS95B_0439 | K08264 |
| PhyloNet and codon_usage_G_score_rank_order_threshold | METSMITS95B_1120 | K00205 |
| PhyloNet and codon_usage_G_score_rank_order_threshold | METSMITS95C_0410 | K00205 |
| PhyloNet and codon_usage_G_score_rank_order_threshold | METSMITS95C_1166 | K00205 |
| PhyloNet and codon_usage_G_score_rank_order_threshold | METSMITS95C_1610 | K00205 |
| PhyloNet and codon_usage_G_score_rank_order_threshold | METSMITS95D_0359 | K00205 |
| PhyloNet and codon_usage_G_score_rank_order_threshold | METSMITS95D_1075 | K00205 |
| PhyloNet and codon_usage_G_score_rank_order_threshold | METSMITS95D_1511 | K00205 |
| PhyloNet and codon_usage_G_score_rank_order_threshold | METSMITS96A_0361 | K00205 |
| PhyloNet and codon_usage_G_score_rank_order_threshold | METSMITS96A_1105 | K00205 |
| PhyloNet and codon_usage_G_score_rank_order_threshold | METSMITS96A_1557 | K00205 |
| PhyloNet and codon_usage_G_score_rank_order_threshold | METSMITS96B_0381 | K00205 |
| PhyloNet and codon_usage_G_score_rank_order_threshold | METSMITS96B_0450 | K08264 |
| PhyloNet and codon_usage_G_score_rank_order_threshold | METSMITS96B_1035 | K00205 |
| PhyloNet and codon_usage_G_score_rank_order_threshold | METSMITS96B_1401 | K00205 |
| PhyloNet and codon_usage_G_score_rank_order_threshold | METSMITS96C_0321 | K00205 |
| PhyloNet and codon_usage_G_score_rank_order_threshold | METSMITS96C_1067 | K00205 |
| PhyloNet and codon_usage_G_score_rank_order_threshold | METSMITS96C_1390 | K00205 |
| PhyloNet and dinuc_3_1_G_score_rank_order_threshold | METSMIALI_0886 | K00205 |
| PhyloNet and dinuc_3_1_G_score_rank_order_threshold | METSMIF1_0380 | K00205 |
| PhyloNet and dinuc_3_1_G_score_rank_order_threshold | METSMIF1_0784 | K00205 |
| PhyloNet and dinuc_3_1_G_score_rank_order_threshold | METSMITS145A_0864 | K00205 |
| PhyloNet and dinuc_3_1_G_score_rank_order_threshold | METSMITS145A_1086 | K00205 |
| PhyloNet and dinuc_3_1_G_score_rank_order_threshold | METSMITS145B_0772 | K00205 |
| PhyloNet and dinuc_3_1_G_score_rank_order_threshold | METSMITS145B_1316 | K00205 |
| PhyloNet and dinuc_3_1_G_score_rank_order_threshold | METSMITS146A_0746 | K00205 |
| PhyloNet and dinuc_3_1_G_score_rank_order_threshold | METSMITS146A_1149 | K00205 |
| PhyloNet and dinuc_3_1_G_score_rank_order_threshold | METSMITS146B_0749 | K00205 |
| PhyloNet and dinuc_3_1_G_score_rank_order_threshold | METSMITS146B_1139 | K00205 |
| PhyloNet and dinuc_3_1_G_score_rank_order_threshold | METSMITS146C_1151 | K00205 |
| PhyloNet and dinuc_3_1_G_score_rank_order_threshold | METSMITS146D_0647 | K00205 |
| PhyloNet and dinuc_3_1_G_score_rank_order_threshold | METSMITS146D_1022 | K00205 |
| PhyloNet and dinuc_3_1_G_score_rank_order_threshold | METSMITS146E_1088 | K00205 |
| PhyloNet and dinuc_3_1_G_score_rank_order_threshold | METSMITS147A_1078 | K00205 |
| PhyloNet and dinuc_3_1_G_score_rank_order_threshold | METSMITS147B_1133 | K00205 |
| PhyloNet and dinuc_3_1_G_score_rank_order_threshold | METSMITS147C_0650 | K00320 |
| PhyloNet and dinuc_3_1_G_score_rank_order_threshold | METSMITS147C_1016 | K00205 |
| PhyloNet and dinuc_3_1_G_score_rank_order_threshold | METSMITS94A_1012 | K00205 |
| PhyloNet and dinuc_3_1_G_score_rank_order_threshold | METSMITS94B_1008 | K00205 |
| PhyloNet and dinuc_3_1_G_score_rank_order_threshold | METSMITS94C_0517 | K00320 |
| PhyloNet and dinuc_3_1_G_score_rank_order_threshold | METSMITS94C_0999 | K00205 |
| PhyloNet and dinuc_3_1_G_score_rank_order_threshold | METSMITS95A_0601 | K00320 |
| PhyloNet and dinuc_3_1_G_score_rank_order_threshold | METSMITS95A_1071 | K00205 |
| PhyloNet and dinuc_3_1_G_score_rank_order_threshold | METSMITS95B_0589 | K00320 |
| PhyloNet and dinuc_3_1_G_score_rank_order_threshold | METSMITS95B_1051 | K00205 |
| PhyloNet and dinuc_3_1_G_score_rank_order_threshold | METSMITS95C_0643 | K00320 |
| PhyloNet and dinuc_3_1_G_score_rank_order_threshold | METSMITS95C_1099 | K00205 |
| PhyloNet and dinuc_3_1_G_score_rank_order_threshold | METSMITS95D_1007 | K00205 |
| PhyloNet and dinuc_3_1_G_score_rank_order_threshold | METSMITS96A_1037 | K00205 |
| PhyloNet and dinuc_3_1_G_score_rank_order_threshold | METSMITS96B_0594 | K00320 |
| PhyloNet and dinuc_3_1_G_score_rank_order_threshold | METSMITS96B_0967 | K00205 |
| PhyloNet and dinuc_3_1_G_score_rank_order_threshold | METSMITS96C_0997 | K00205 |
| PhyloNet and dinuc_3_1_G_score_rank_order_threshold | METSMITS96C_1735 | K00205 |
| PhyloNet and kwords_order_2_G_score_rank_order_threshold | METSMIALI_1289 | K00122 |
| PhyloNet and kwords_order_2_G_score_rank_order_threshold | METSMIF1_0386 | K00122 |
| PhyloNet and kwords_order_2_G_score_rank_order_threshold | METSMITS145A_0870 | K00122 |
| PhyloNet and kwords_order_2_G_score_rank_order_threshold | METSMITS145B_0778 | K00122 |
| PhyloNet and kwords_order_2_G_score_rank_order_threshold | METSMITS146A_0752 | K00122 |
| PhyloNet and kwords_order_2_G_score_rank_order_threshold | METSMITS146B_0755 | K00122 |
| PhyloNet and kwords_order_2_G_score_rank_order_threshold | METSMITS146C_1672 | K00122 |
| PhyloNet and kwords_order_2_G_score_rank_order_threshold | METSMITS146D_0653 | K00122 |
| PhyloNet and kwords_order_2_G_score_rank_order_threshold | METSMITS146E_0783 | K00122 |
| PhyloNet and kwords_order_2_G_score_rank_order_threshold | METSMITS147A_0742 | K00122 |
| PhyloNet and kwords_order_2_G_score_rank_order_threshold | METSMITS147B_1564 | K00122 |
| PhyloNet and kwords_order_2_G_score_rank_order_threshold | METSMITS147C_0851 | K00122 |
| PhyloNet and kwords_order_2_G_score_rank_order_threshold | METSMITS94A_0708 | K00122 |
| PhyloNet and kwords_order_2_G_score_rank_order_threshold | METSMITS94B_0714 | K00122 |
| PhyloNet and kwords_order_2_G_score_rank_order_threshold | METSMITS94C_0711 | K00122 |
| PhyloNet and kwords_order_2_G_score_rank_order_threshold | METSMITS95A_1453 | K00122 |
| PhyloNet and kwords_order_2_G_score_rank_order_threshold | METSMITS95B_1495 | K00122 |
| PhyloNet and kwords_order_2_G_score_rank_order_threshold | METSMITS95C_1536 | K00122 |
| PhyloNet and kwords_order_2_G_score_rank_order_threshold | METSMITS95D_1442 | K00122 |
| PhyloNet and kwords_order_2_G_score_rank_order_threshold | METSMITS96A_1475 | K00122 |
| PhyloNet and kwords_order_2_G_score_rank_order_threshold | METSMITS96B_1323 | K00122 |
| PhyloNet and kwords_order_2_G_score_rank_order_threshold | METSMITS96C_1729 | K00122 |
| PhyloNet and kwords_order_2_G_score_rank_order_threshold | METSMIALI_0037 | K00205 |
| PhyloNet and kwords_order_2_G_score_rank_order_threshold | METSMIALI_0886 | K00205 |
| PhyloNet and kwords_order_2_G_score_rank_order_threshold | METSMIF1_0784 | K00205 |
| PhyloNet and kwords_order_2_G_score_rank_order_threshold | METSMIF1_1646 | K00205 |
| PhyloNet and kwords_order_2_G_score_rank_order_threshold | METSMITS145A_0445 | K00205 |
| PhyloNet and kwords_order_2_G_score_rank_order_threshold | METSMITS145A_1086 | K00205 |
| PhyloNet and kwords_order_2_G_score_rank_order_threshold | METSMITS145A_1594 | K00205 |
| PhyloNet and kwords_order_2_G_score_rank_order_threshold | METSMITS145B_0331 | K00205 |
| PhyloNet and kwords_order_2_G_score_rank_order_threshold | METSMITS145B_0772 | K00205 |
| PhyloNet and kwords_order_2_G_score_rank_order_threshold | METSMITS145B_0824 | K00205 |
| PhyloNet and kwords_order_2_G_score_rank_order_threshold | METSMITS145B_1316 | K00205 |
| PhyloNet and kwords_order_2_G_score_rank_order_threshold | METSMITS146A_0513 | K00205 |
| PhyloNet and kwords_order_2_G_score_rank_order_threshold | METSMITS146A_0746 | K00205 |
| PhyloNet and kwords_order_2_G_score_rank_order_threshold | METSMITS146A_0828 | K00205 |
| PhyloNet and kwords_order_2_G_score_rank_order_threshold | METSMITS146A_1149 | K00205 |
| PhyloNet and kwords_order_2_G_score_rank_order_threshold | METSMITS146B_0324 | K00205 |
| PhyloNet and kwords_order_2_G_score_rank_order_threshold | METSMITS146B_0749 | K00205 |
| PhyloNet and kwords_order_2_G_score_rank_order_threshold | METSMITS146B_0819 | K00205 |
| PhyloNet and kwords_order_2_G_score_rank_order_threshold | METSMITS146B_1139 | K00205 |
| PhyloNet and kwords_order_2_G_score_rank_order_threshold | METSMITS146C_0709 | K00205 |
| PhyloNet and kwords_order_2_G_score_rank_order_threshold | METSMITS146C_1151 | K00205 |
| PhyloNet and kwords_order_2_G_score_rank_order_threshold | METSMITS146C_1680 | K00205 |
| PhyloNet and kwords_order_2_G_score_rank_order_threshold | METSMITS146D_0647 | K00205 |
| PhyloNet and kwords_order_2_G_score_rank_order_threshold | METSMITS146D_1022 | K00205 |
| PhyloNet and kwords_order_2_G_score_rank_order_threshold | METSMITS146E_0322 | K00205 |
| PhyloNet and kwords_order_2_G_score_rank_order_threshold | METSMITS146E_1088 | K00205 |
| PhyloNet and kwords_order_2_G_score_rank_order_threshold | METSMITS146E_1102 | K00579 |
| PhyloNet and kwords_order_2_G_score_rank_order_threshold | METSMITS146E_1543 | K00205 |
| PhyloNet and kwords_order_2_G_score_rank_order_threshold | METSMITS147A_0308 | K00205 |
| PhyloNet and kwords_order_2_G_score_rank_order_threshold | METSMITS147A_1078 | K00205 |
| PhyloNet and kwords_order_2_G_score_rank_order_threshold | METSMITS147A_1092 | K00579 |
| PhyloNet and kwords_order_2_G_score_rank_order_threshold | METSMITS147A_1579 | K00205 |
| PhyloNet and kwords_order_2_G_score_rank_order_threshold | METSMITS147B_0324 | K00205 |
| PhyloNet and kwords_order_2_G_score_rank_order_threshold | METSMITS147B_1133 | K00205 |
| PhyloNet and kwords_order_2_G_score_rank_order_threshold | METSMITS147B_1147 | K00579 |
| PhyloNet and kwords_order_2_G_score_rank_order_threshold | METSMITS147B_1635 | K00205 |
| PhyloNet and kwords_order_2_G_score_rank_order_threshold | METSMITS147C_0335 | K00205 |
| PhyloNet and kwords_order_2_G_score_rank_order_threshold | METSMITS147C_1016 | K00205 |
| PhyloNet and kwords_order_2_G_score_rank_order_threshold | METSMITS147C_1030 | K00579 |
| PhyloNet and kwords_order_2_G_score_rank_order_threshold | METSMITS147C_1668 | K00205 |
| PhyloNet and kwords_order_2_G_score_rank_order_threshold | METSMITS94A_1012 | K00205 |
| PhyloNet and kwords_order_2_G_score_rank_order_threshold | METSMITS94A_1026 | K00579 |
| PhyloNet and kwords_order_2_G_score_rank_order_threshold | METSMITS94B_1008 | K00205 |
| PhyloNet and kwords_order_2_G_score_rank_order_threshold | METSMITS94B_1023 | K00579 |
| PhyloNet and kwords_order_2_G_score_rank_order_threshold | METSMITS94B_1486 | K00205 |
| PhyloNet and kwords_order_2_G_score_rank_order_threshold | METSMITS94C_0999 | K00205 |
| PhyloNet and kwords_order_2_G_score_rank_order_threshold | METSMITS94C_1013 | K00579 |
| PhyloNet and kwords_order_2_G_score_rank_order_threshold | METSMITS94C_1473 | K00205 |
| PhyloNet and kwords_order_2_G_score_rank_order_threshold | METSMITS95A_1071 | K00205 |
| PhyloNet and kwords_order_2_G_score_rank_order_threshold | METSMITS95A_1087 | K00579 |
| PhyloNet and kwords_order_2_G_score_rank_order_threshold | METSMITS95A_1614 | K00205 |
| PhyloNet and kwords_order_2_G_score_rank_order_threshold | METSMITS95B_1051 | K00205 |
| PhyloNet and kwords_order_2_G_score_rank_order_threshold | METSMITS95B_1065 | K00579 |
| PhyloNet and kwords_order_2_G_score_rank_order_threshold | METSMITS95C_1099 | K00205 |
| PhyloNet and kwords_order_2_G_score_rank_order_threshold | METSMITS95C_1112 | K00579 |
| PhyloNet and kwords_order_2_G_score_rank_order_threshold | METSMITS95C_1610 | K00205 |
| PhyloNet and kwords_order_2_G_score_rank_order_threshold | METSMITS95D_1007 | K00205 |
| PhyloNet and kwords_order_2_G_score_rank_order_threshold | METSMITS95D_1021 | K00579 |
| PhyloNet and kwords_order_2_G_score_rank_order_threshold | METSMITS95D_1511 | K00205 |
| PhyloNet and kwords_order_2_G_score_rank_order_threshold | METSMITS96A_1037 | K00205 |
| PhyloNet and kwords_order_2_G_score_rank_order_threshold | METSMITS96A_1051 | K00579 |
| PhyloNet and kwords_order_2_G_score_rank_order_threshold | METSMITS96A_1557 | K00205 |
| PhyloNet and kwords_order_2_G_score_rank_order_threshold | METSMITS96B_0967 | K00205 |
| PhyloNet and kwords_order_2_G_score_rank_order_threshold | METSMITS96B_0981 | K00579 |
| PhyloNet and kwords_order_2_G_score_rank_order_threshold | METSMITS96B_1401 | K00205 |
| PhyloNet and kwords_order_2_G_score_rank_order_threshold | METSMITS96C_0321 | K00205 |
| PhyloNet and kwords_order_2_G_score_rank_order_threshold | METSMITS96C_0997 | K00205 |
| PhyloNet and kwords_order_2_G_score_rank_order_threshold | METSMITS96C_1390 | K00205 |
| PhyloNet and kwords_order_2_G_score_rank_order_threshold | METSMITS96C_1735 | K00205 |
| PhyloNet and kwords_order_3_G_score_rank_order_threshold | METSMIALI_1289 | K00122 |
| PhyloNet and kwords_order_3_G_score_rank_order_threshold | METSMIF1_0386 | K00122 |
| PhyloNet and kwords_order_3_G_score_rank_order_threshold | METSMITS145A_0870 | K00122 |
| PhyloNet and kwords_order_3_G_score_rank_order_threshold | METSMITS145B_0778 | K00122 |
| PhyloNet and kwords_order_3_G_score_rank_order_threshold | METSMITS146A_0752 | K00122 |
| PhyloNet and kwords_order_3_G_score_rank_order_threshold | METSMITS146B_0755 | K00122 |
| PhyloNet and kwords_order_3_G_score_rank_order_threshold | METSMITS146C_1672 | K00122 |
| PhyloNet and kwords_order_3_G_score_rank_order_threshold | METSMITS146D_0653 | K00122 |
| PhyloNet and kwords_order_3_G_score_rank_order_threshold | METSMITS146E_0783 | K00122 |
| PhyloNet and kwords_order_3_G_score_rank_order_threshold | METSMITS147A_0742 | K00122 |
| PhyloNet and kwords_order_3_G_score_rank_order_threshold | METSMITS147B_1564 | K00122 |
| PhyloNet and kwords_order_3_G_score_rank_order_threshold | METSMITS147C_0851 | K00122 |
| PhyloNet and kwords_order_3_G_score_rank_order_threshold | METSMITS94A_0708 | K00122 |
| PhyloNet and kwords_order_3_G_score_rank_order_threshold | METSMITS94B_0714 | K00122 |
| PhyloNet and kwords_order_3_G_score_rank_order_threshold | METSMITS94C_0711 | K00122 |
| PhyloNet and kwords_order_3_G_score_rank_order_threshold | METSMITS95A_1453 | K00122 |
| PhyloNet and kwords_order_3_G_score_rank_order_threshold | METSMITS95B_1495 | K00122 |
| PhyloNet and kwords_order_3_G_score_rank_order_threshold | METSMITS95C_1536 | K00122 |
| PhyloNet and kwords_order_3_G_score_rank_order_threshold | METSMITS95D_1442 | K00122 |
| PhyloNet and kwords_order_3_G_score_rank_order_threshold | METSMITS96A_1475 | K00122 |
| PhyloNet and kwords_order_3_G_score_rank_order_threshold | METSMITS96B_1323 | K00122 |
| PhyloNet and kwords_order_3_G_score_rank_order_threshold | METSMITS96C_1729 | K00122 |
| PhyloNet and kwords_order_3_G_score_rank_order_threshold | METSMIALI_0037 | K00205 |
| PhyloNet and kwords_order_3_G_score_rank_order_threshold | METSMIALI_0886 | K00205 |
| PhyloNet and kwords_order_3_G_score_rank_order_threshold | METSMIF1_0784 | K00205 |
| PhyloNet and kwords_order_3_G_score_rank_order_threshold | METSMIF1_1646 | K00205 |
| PhyloNet and kwords_order_3_G_score_rank_order_threshold | METSMITS145A_0445 | K00205 |
| PhyloNet and kwords_order_3_G_score_rank_order_threshold | METSMITS145A_1086 | K00205 |
| PhyloNet and kwords_order_3_G_score_rank_order_threshold | METSMITS145A_1594 | K00205 |
| PhyloNet and kwords_order_3_G_score_rank_order_threshold | METSMITS145B_0331 | K00205 |
| PhyloNet and kwords_order_3_G_score_rank_order_threshold | METSMITS145B_0824 | K00205 |
| PhyloNet and kwords_order_3_G_score_rank_order_threshold | METSMITS145B_1316 | K00205 |
| PhyloNet and kwords_order_3_G_score_rank_order_threshold | METSMITS146A_0513 | K00205 |
| PhyloNet and kwords_order_3_G_score_rank_order_threshold | METSMITS146A_0828 | K00205 |
| PhyloNet and kwords_order_3_G_score_rank_order_threshold | METSMITS146A_1149 | K00205 |
| PhyloNet and kwords_order_3_G_score_rank_order_threshold | METSMITS146B_0324 | K00205 |
| PhyloNet and kwords_order_3_G_score_rank_order_threshold | METSMITS146B_0819 | K00205 |
| PhyloNet and kwords_order_3_G_score_rank_order_threshold | METSMITS146B_1139 | K00205 |
| PhyloNet and kwords_order_3_G_score_rank_order_threshold | METSMITS146C_0709 | K00205 |
| PhyloNet and kwords_order_3_G_score_rank_order_threshold | METSMITS146C_1151 | K00205 |
| PhyloNet and kwords_order_3_G_score_rank_order_threshold | METSMITS146D_1022 | K00205 |
| PhyloNet and kwords_order_3_G_score_rank_order_threshold | METSMITS146E_0322 | K00205 |
| PhyloNet and kwords_order_3_G_score_rank_order_threshold | METSMITS146E_1088 | K00205 |
| PhyloNet and kwords_order_3_G_score_rank_order_threshold | METSMITS146E_1102 | K00579 |
| PhyloNet and kwords_order_3_G_score_rank_order_threshold | METSMITS146E_1157 | K00205 |
| PhyloNet and kwords_order_3_G_score_rank_order_threshold | METSMITS146E_1543 | K00205 |
| PhyloNet and kwords_order_3_G_score_rank_order_threshold | METSMITS147A_0308 | K00205 |
| PhyloNet and kwords_order_3_G_score_rank_order_threshold | METSMITS147A_1078 | K00205 |
| PhyloNet and kwords_order_3_G_score_rank_order_threshold | METSMITS147A_1092 | K00579 |
| PhyloNet and kwords_order_3_G_score_rank_order_threshold | METSMITS147A_1146 | K00205 |
| PhyloNet and kwords_order_3_G_score_rank_order_threshold | METSMITS147A_1579 | K00205 |
| PhyloNet and kwords_order_3_G_score_rank_order_threshold | METSMITS147B_0324 | K00205 |
| PhyloNet and kwords_order_3_G_score_rank_order_threshold | METSMITS147B_1133 | K00205 |
| PhyloNet and kwords_order_3_G_score_rank_order_threshold | METSMITS147B_1147 | K00579 |
| PhyloNet and kwords_order_3_G_score_rank_order_threshold | METSMITS147B_1201 | K00205 |
| PhyloNet and kwords_order_3_G_score_rank_order_threshold | METSMITS147B_1635 | K00205 |
| PhyloNet and kwords_order_3_G_score_rank_order_threshold | METSMITS147C_0335 | K00205 |
| PhyloNet and kwords_order_3_G_score_rank_order_threshold | METSMITS147C_1016 | K00205 |
| PhyloNet and kwords_order_3_G_score_rank_order_threshold | METSMITS147C_1030 | K00579 |
| PhyloNet and kwords_order_3_G_score_rank_order_threshold | METSMITS147C_1084 | K00205 |
| PhyloNet and kwords_order_3_G_score_rank_order_threshold | METSMITS147C_1668 | K00205 |
| PhyloNet and kwords_order_3_G_score_rank_order_threshold | METSMITS94A_1012 | K00205 |
| PhyloNet and kwords_order_3_G_score_rank_order_threshold | METSMITS94A_1026 | K00579 |
| PhyloNet and kwords_order_3_G_score_rank_order_threshold | METSMITS94A_1080 | K00205 |
| PhyloNet and kwords_order_3_G_score_rank_order_threshold | METSMITS94B_1008 | K00205 |
| PhyloNet and kwords_order_3_G_score_rank_order_threshold | METSMITS94B_1023 | K00579 |
| PhyloNet and kwords_order_3_G_score_rank_order_threshold | METSMITS94B_1083 | K00205 |
| PhyloNet and kwords_order_3_G_score_rank_order_threshold | METSMITS94B_1486 | K00205 |
| PhyloNet and kwords_order_3_G_score_rank_order_threshold | METSMITS94C_0999 | K00205 |
| PhyloNet and kwords_order_3_G_score_rank_order_threshold | METSMITS94C_1013 | K00579 |
| PhyloNet and kwords_order_3_G_score_rank_order_threshold | METSMITS94C_1067 | K00205 |
| PhyloNet and kwords_order_3_G_score_rank_order_threshold | METSMITS94C_1473 | K00205 |
| PhyloNet and kwords_order_3_G_score_rank_order_threshold | METSMITS95A_1071 | K00205 |
| PhyloNet and kwords_order_3_G_score_rank_order_threshold | METSMITS95A_1087 | K00579 |
| PhyloNet and kwords_order_3_G_score_rank_order_threshold | METSMITS95A_1614 | K00205 |
| PhyloNet and kwords_order_3_G_score_rank_order_threshold | METSMITS95B_1051 | K00205 |
| PhyloNet and kwords_order_3_G_score_rank_order_threshold | METSMITS95B_1065 | K00579 |
| PhyloNet and kwords_order_3_G_score_rank_order_threshold | METSMITS95B_1120 | K00205 |
| PhyloNet and kwords_order_3_G_score_rank_order_threshold | METSMITS95C_1099 | K00205 |
| PhyloNet and kwords_order_3_G_score_rank_order_threshold | METSMITS95C_1112 | K00579 |
| PhyloNet and kwords_order_3_G_score_rank_order_threshold | METSMITS95C_1610 | K00205 |
| PhyloNet and kwords_order_3_G_score_rank_order_threshold | METSMITS95D_1007 | K00205 |
| PhyloNet and kwords_order_3_G_score_rank_order_threshold | METSMITS95D_1021 | K00579 |
| PhyloNet and kwords_order_3_G_score_rank_order_threshold | METSMITS95D_1075 | K00205 |
| PhyloNet and kwords_order_3_G_score_rank_order_threshold | METSMITS95D_1511 | K00205 |
| PhyloNet and kwords_order_3_G_score_rank_order_threshold | METSMITS96A_1037 | K00205 |
| PhyloNet and kwords_order_3_G_score_rank_order_threshold | METSMITS96A_1051 | K00579 |
| PhyloNet and kwords_order_3_G_score_rank_order_threshold | METSMITS96A_1105 | K00205 |
| PhyloNet and kwords_order_3_G_score_rank_order_threshold | METSMITS96A_1557 | K00205 |
| PhyloNet and kwords_order_3_G_score_rank_order_threshold | METSMITS96B_0967 | K00205 |
| PhyloNet and kwords_order_3_G_score_rank_order_threshold | METSMITS96B_0981 | K00579 |
| PhyloNet and kwords_order_3_G_score_rank_order_threshold | METSMITS96B_1035 | K00205 |
| PhyloNet and kwords_order_3_G_score_rank_order_threshold | METSMITS96B_1401 | K00205 |
| PhyloNet and kwords_order_3_G_score_rank_order_threshold | METSMITS96C_0321 | K00205 |
| PhyloNet and kwords_order_3_G_score_rank_order_threshold | METSMITS96C_0997 | K00205 |
| PhyloNet and kwords_order_3_G_score_rank_order_threshold | METSMITS96C_1390 | K00205 |
| PhyloNet and kwords_order_4_G_score_rank_order_threshold | METSMIALI_0037 | K00205 |
| PhyloNet and kwords_order_4_G_score_rank_order_threshold | METSMIALI_0886 | K00205 |
| PhyloNet and kwords_order_4_G_score_rank_order_threshold | METSMIALI_0955 | K00205 |
| PhyloNet and kwords_order_4_G_score_rank_order_threshold | METSMIF1_0715 | K00205 |
| PhyloNet and kwords_order_4_G_score_rank_order_threshold | METSMIF1_0784 | K00205 |
| PhyloNet and kwords_order_4_G_score_rank_order_threshold | METSMIF1_1646 | K00205 |
| PhyloNet and kwords_order_4_G_score_rank_order_threshold | METSMITS145A_0445 | K00205 |
| PhyloNet and kwords_order_4_G_score_rank_order_threshold | METSMITS145A_1086 | K00205 |
| PhyloNet and kwords_order_4_G_score_rank_order_threshold | METSMITS145A_1154 | K00205 |
| PhyloNet and kwords_order_4_G_score_rank_order_threshold | METSMITS145A_1594 | K00205 |
| PhyloNet and kwords_order_4_G_score_rank_order_threshold | METSMITS145B_0331 | K00205 |
| PhyloNet and kwords_order_4_G_score_rank_order_threshold | METSMITS145B_0824 | K00205 |
| PhyloNet and kwords_order_4_G_score_rank_order_threshold | METSMITS145B_1316 | K00205 |
| PhyloNet and kwords_order_4_G_score_rank_order_threshold | METSMITS145B_1389 | K00205 |
| PhyloNet and kwords_order_4_G_score_rank_order_threshold | METSMITS146A_0513 | K00205 |
| PhyloNet and kwords_order_4_G_score_rank_order_threshold | METSMITS146A_0828 | K00205 |
| PhyloNet and kwords_order_4_G_score_rank_order_threshold | METSMITS146A_1149 | K00205 |
| PhyloNet and kwords_order_4_G_score_rank_order_threshold | METSMITS146A_1220 | K00205 |
| PhyloNet and kwords_order_4_G_score_rank_order_threshold | METSMITS146B_0324 | K00205 |
| PhyloNet and kwords_order_4_G_score_rank_order_threshold | METSMITS146B_0819 | K00205 |
| PhyloNet and kwords_order_4_G_score_rank_order_threshold | METSMITS146B_1139 | K00205 |
| PhyloNet and kwords_order_4_G_score_rank_order_threshold | METSMITS146B_1209 | K00205 |
| PhyloNet and kwords_order_4_G_score_rank_order_threshold | METSMITS146C_0709 | K00205 |
| PhyloNet and kwords_order_4_G_score_rank_order_threshold | METSMITS146C_1151 | K00205 |
| PhyloNet and kwords_order_4_G_score_rank_order_threshold | METSMITS146C_1260 | K00205 |
| PhyloNet and kwords_order_4_G_score_rank_order_threshold | METSMITS146D_1022 | K00205 |
| PhyloNet and kwords_order_4_G_score_rank_order_threshold | METSMITS146E_0322 | K00205 |
| PhyloNet and kwords_order_4_G_score_rank_order_threshold | METSMITS146E_1088 | K00205 |
| PhyloNet and kwords_order_4_G_score_rank_order_threshold | METSMITS146E_1157 | K00205 |
| PhyloNet and kwords_order_4_G_score_rank_order_threshold | METSMITS146E_1543 | K00205 |
| PhyloNet and kwords_order_4_G_score_rank_order_threshold | METSMITS147A_0308 | K00205 |
| PhyloNet and kwords_order_4_G_score_rank_order_threshold | METSMITS147A_1078 | K00205 |
| PhyloNet and kwords_order_4_G_score_rank_order_threshold | METSMITS147A_1146 | K00205 |
| PhyloNet and kwords_order_4_G_score_rank_order_threshold | METSMITS147A_1579 | K00205 |
| PhyloNet and kwords_order_4_G_score_rank_order_threshold | METSMITS147B_0324 | K00205 |
| PhyloNet and kwords_order_4_G_score_rank_order_threshold | METSMITS147B_1133 | K00205 |
| PhyloNet and kwords_order_4_G_score_rank_order_threshold | METSMITS147B_1201 | K00205 |
| PhyloNet and kwords_order_4_G_score_rank_order_threshold | METSMITS147B_1570 | K00205 |
| PhyloNet and kwords_order_4_G_score_rank_order_threshold | METSMITS147B_1635 | K00205 |
| PhyloNet and kwords_order_4_G_score_rank_order_threshold | METSMITS147C_0335 | K00205 |
| PhyloNet and kwords_order_4_G_score_rank_order_threshold | METSMITS147C_0845 | K00205 |
| PhyloNet and kwords_order_4_G_score_rank_order_threshold | METSMITS147C_1016 | K00205 |
| PhyloNet and kwords_order_4_G_score_rank_order_threshold | METSMITS147C_1084 | K00205 |
| PhyloNet and kwords_order_4_G_score_rank_order_threshold | METSMITS147C_1668 | K00205 |
| PhyloNet and kwords_order_4_G_score_rank_order_threshold | METSMITS94A_1012 | K00205 |
| PhyloNet and kwords_order_4_G_score_rank_order_threshold | METSMITS94A_1080 | K00205 |
| PhyloNet and kwords_order_4_G_score_rank_order_threshold | METSMITS94B_1008 | K00205 |
| PhyloNet and kwords_order_4_G_score_rank_order_threshold | METSMITS94B_1083 | K00205 |
| PhyloNet and kwords_order_4_G_score_rank_order_threshold | METSMITS94B_1486 | K00205 |
| PhyloNet and kwords_order_4_G_score_rank_order_threshold | METSMITS94C_0999 | K00205 |
| PhyloNet and kwords_order_4_G_score_rank_order_threshold | METSMITS94C_1067 | K00205 |
| PhyloNet and kwords_order_4_G_score_rank_order_threshold | METSMITS94C_1473 | K00205 |
| PhyloNet and kwords_order_4_G_score_rank_order_threshold | METSMITS95A_1071 | K00205 |
| PhyloNet and kwords_order_4_G_score_rank_order_threshold | METSMITS95A_1143 | K00205 |
| PhyloNet and kwords_order_4_G_score_rank_order_threshold | METSMITS95A_1614 | K00205 |
| PhyloNet and kwords_order_4_G_score_rank_order_threshold | METSMITS95B_1051 | K00205 |
| PhyloNet and kwords_order_4_G_score_rank_order_threshold | METSMITS95B_1120 | K00205 |
| PhyloNet and kwords_order_4_G_score_rank_order_threshold | METSMITS95C_1099 | K00205 |
| PhyloNet and kwords_order_4_G_score_rank_order_threshold | METSMITS95C_1166 | K00205 |
| PhyloNet and kwords_order_4_G_score_rank_order_threshold | METSMITS95C_1610 | K00205 |
| PhyloNet and kwords_order_4_G_score_rank_order_threshold | METSMITS95D_1007 | K00205 |
| PhyloNet and kwords_order_4_G_score_rank_order_threshold | METSMITS95D_1075 | K00205 |
| PhyloNet and kwords_order_4_G_score_rank_order_threshold | METSMITS95D_1511 | K00205 |
| PhyloNet and kwords_order_4_G_score_rank_order_threshold | METSMITS96A_1037 | K00205 |
| PhyloNet and kwords_order_4_G_score_rank_order_threshold | METSMITS96A_1105 | K00205 |
| PhyloNet and kwords_order_4_G_score_rank_order_threshold | METSMITS96A_1557 | K00205 |
| PhyloNet and kwords_order_4_G_score_rank_order_threshold | METSMITS96B_0967 | K00205 |
| PhyloNet and kwords_order_4_G_score_rank_order_threshold | METSMITS96B_1035 | K00205 |
| PhyloNet and kwords_order_4_G_score_rank_order_threshold | METSMITS96B_1401 | K00205 |
| PhyloNet and kwords_order_4_G_score_rank_order_threshold | METSMITS96C_0997 | K00205 |
| PhyloNet and kwords_order_4_G_score_rank_order_threshold | METSMITS96C_1390 | K00205 |
| PhyloNet and kwords_order_5_G_score_rank_order_threshold | METSMITS146E_1543 | K00205 |
| PhyloNet and kwords_order_5_G_score_rank_order_threshold | METSMITS147B_1635 | K00205 |
| PhyloNet and kwords_order_5_G_score_rank_order_threshold | METSMITS147C_1668 | K00205 |

### Example 10

### Expression Profiling of M. smithii Strains by RNA-Seq

[0216] RNA-Seq was used to profile the transcriptomes of five of the M. smithii isolates: One from each member of the MZ family, one from each of the DZ co-twins, plus the PS type strain. The five strains from the two families were chosen because SNP, OGU, and EC analyses indicated that these isolates were representative of the strains from their human hosts, and because they exhibited consistent patterns of growth on MBC medium containing 2.8 or 44.1 mM formate, a substrate for the first enzyme involved in the methanogenesis pathway, formate dehydrogenase (EC 1.2.1.2 in FIG. 24B). Triplicate cultures were grown to midlog phase in medium with either low or high formate concentrations under an atmosphere that contained 80% hydrogen. Total RNA was extracted, structural RNAs were depleted, and double-stranded cDNA was synthesized and sequenced with an Illumina GA-IIx instrument (36-nt reads; 3-4 million reads per sample, with each biological triplicate sequenced twice as technical replicates). Reads were normalized to reads per kilobase per million (RPKM) and mapped back to each strain's own reference genome. At midlog phase, the number of protein-coding genes with ≧10 mapped mRNA-derived reads varied from 1,594 to 1,782 (89-97% of all CDS) among the 5 strains (Table 29). When the 987 OGUs that comprise the conserved core of the M. smithii pan-genome were compared to 31 sequenced methanogens associated with the human gut (M. stadmanae), cow rumen (M. ruminantium) or various environmental habitats, 55 OGUs were identified as unique to M. smithii (Blastp threshold E<10⁻¹⁰), of which 42 encoded predicted conserved hypothetical or hypothetical proteins (Table 30). At the depth of sequencing achieved, RNA-Seq indicated that 34 of these 42 hypothetical genes were expressed in midlog phase in the PS type strain (Table 30).

[0217] Next the phenotypes of strains based on normalized expression of each gene encoding each EC were compared. Examining the gene expression data across functional groups allowed the strains to be compared: The results revealed that no gene family was consistently regulated by formate across all strains. To identify genes significantly regulated by formate in each strain, normalized reads with CyberT were first analyzed. Two criteria were used for determining significance in regulation: a posterior probability of differential expression (PPDE) threshold ≧0.97, and a ≧2-fold difference in expression (either direction) when a given strain was incubated in low versus high levels of formate (Table 31).

[0218] All of the genes in the methanogenesis pathway illustrated in FIG. 24C were expressed in all six strains. Nonetheless, several of the genes in this pathway exhibited strain-specific differences in their levels of expression including EC 1.5.99.9 (F420-dependent methylene tetrahydromethanopterin dehydrogenase) and EC 1.5.99.11 (5,10-methylenetetrahydromethanopterin reductase). Cobalt, an important cofactor for some of the enzymes in the methanogenesis pathway, is translocated by an ABC transporter: Components of the transporter exhibited formate-responsive behavior in the PS type strain and in the strain from one of the DZ co-twins (TS145) but not in the strains from her sister or mother (Table 31).

[0219] Looking beyond the methanogenesis pathway, none of the genes encoding ECs in the M. smithii pan-genome satisfied our criteria for being responsive to differences in formate levels in the medium at midlog phase in all strains. However, as with components of the methanogenesis pathway, some exhibited strain-specific differences in formate sensitivity e.g., in strain METSMITS145B (from DZ co-twin 1) genes encoding the subunits of MtrH (EC 2.1.1.86; tetrahydromethanopterin S-methyltransferase) were up-regulated in high formate, whereas in strain METSMITS146E (from the sister of DZ co-twin 1) they were down-regulated (see Table 31 for additional examples).

[0220] M. smithii uses ammonia as a nitrogen source via an energy-dependent glutamine synthetase-glutamate synthase pathway, which has high affinity for ammonia, and a ATP-independent pathway with lower affinity (FIG. 17A). Both pathways are expressed in all strains, with 0.4-1.21% of reads mapping to enzymes involved in assimilation of ammonia. The energy-dependent GlnA pathway is generally expressed at a much higher level than the low affinity pathway, although strain-specific differences in levels expression were noted. With few exceptions, such as the genes encoding EC 1.4.1.4 and EC 1.4.1.13 in strains METSMITS145B and METSMITS96A, components of both pathways failed to exhibit a significant difference in their levels of expression in any of the strains as a function of formate concentration. Another exception was the ammonium transporter (AmtB) (FIGS. 17 B and C and Table 31).

[0221] Using the threshold criteria for formate-responsive expression, four of the six strains were defined as having genes that were sensitive to levels of this compound. Table 31 lists the 9 genes present in type strain PS, the 340 genes in the strain recovered from the mother of the DZ co-twins (TS145), the 23 genes in the strain isolated from one of her daughters (TS146), and the 81 genes in the strain from the mother of the MZ twins (TS96). Intriguingly, no genes were identified in strains from MZ twins of this mother (TS94, TS95) that exhibited significant formate responsiveness. The core component of M. smithii's pan-genome contained no genes that met our criteria for formate-responsive behavior in every isolate.

[0222] The utility of using formate to identify strain-specific phenotypes is best illustrated by ALPs. As noted above, each sequenced strain contained a distinctive repertoire of genes encoding ALPs, with only 6 ALP OGUs shared by all isolates. ALP OGUs 112, 208, 412, and 827 are encoded by genes present in 4-6 of the strains: None of the genes are formate-responsive but members of each OGU exhibit strain-specific differences in their levels of expression (levels of expression are also notably different between ALP OGUs). OGUs 18, 37, 133, and 226 show strain-specific differences in their representation, strain-specific differences in their levels of expression, plus within-OGU differences in their formate sensitivity (FIG. 18).

TABLE 29
Overview of RNA-Seq dataset

| strain | fraction_CDS | number_CDS | total_mapped | total_reads |
|---|---|---|---|---|
| METSMITS94C | 0.0294 | 93481 | 3302490 | 3429629 |
| METSMITS95D | 0.04526 | 138514 | 3170100 | 3278630 |
| METSMITS96A | 0.06311 | 234981 | 3994000 | 4095260 |
| METSMITS145B | 0.05809 | 153439 | 2873157 | 3116025 |
| METSMITS146E | 0.08068 | 190337 | 2756408 | 2895607 |
| MsmPS | 0.1027 | 219511 | 2621639 | 2713609 |
| overall | 0.06321 | 171710 | 3119632 | 3254793 |

Average number of reads assigned to protein coding regions (CDS), the total number of mapped reads, and the total number of reads for each strain, averaged across all samples for that strain.

TABLE 30
OGUs present in the M. smithii core genome but not in other sequence methanogens*

| | | mRNA |
|---|---|---|
| | | detected |
| Cluster | Annotation (M. smithii type strain) | in vitro? |
| Cluster 1042 | hypothetical protein Msm_0799 [Methanobrevibacter smithii ATCC 35061] | yes |
| Cluster 1066 | hypothetical protein Msm_0212 [Methanobrevibacter smithii ATCC 35061] | yes |
| Cluster 1086 | hypothetical protein Msm_0258 [Methanobrevibacter smithii ATCC 35061] | yes |
| Cluster 1102 | O-linked GlcNAc transferase [Methanobrevibacter smithii ATCC 35061] | |
| Cluster 1114 | hypothetical protein Msm_0067 [Methanobrevibacter smithii ATCC 35061] | yes |
| Cluster 1145 | hypothetical protein Msm_1152 [Methanobrevibacter smithii ATCC 35061] | yes |
| Cluster 1260 | acetylesterase [Methanobrevibacter smithii ATCC 35061] | |
| Cluster 1348 | hypothetical protein Msm_1729 [Methanobrevibacter smithii ATCC 35061] | yes |
| Cluster 1388 | putative SAM-dependent methyltransferase [Methanobrevibacter smithii | |
| | ATCC 35061] | |
| Cluster 1414 | cobalt ABC transporter, permease component, CbiQ [Methanobrevibacter smithii | |
| | ATCC 35061] | |
| Cluster 1463 | hypothetical protein Msm_0499 [Methanobrevibacter smithii ATCC 35061] | yes |
| Cluster 1483 | hypothetical protein Msm_0529 [Methanobrevibacter smithii ATCC 35061] | yes |
| Cluster 1503 | hypothetical protein Msm_1205 [Methanobrevibacter smithii ATCC 35061] | yes |
| Cluster 1510 | putative calcium-binding protein [Methanobrevibacter smithii ATCC 35061] | |
| Cluster 1641 | hypothetical protein Msm_1696 [Methanobrevibacter smithii ATCC 35061] | yes |
| Cluster 1665 | hypothetical protein Msm_1458 [Methanobrevibacter smithii ATCC 35061] | yes |
| Cluster 1672 | major facilitator superfamily permease [Methanobrevibacter smithii ATCC 35061] | |
| Cluster 1826 | hypothetical protein Msm_0259 [Methanobrevibacter smithii ATCC 35061] | yes |
| Cluster 1876 | hypothetical protein Msm_1490 [Methanobrevibacter smithii ATCC 35061] | yes |
| Cluster 1883 | hypothetical protein Msm_1571 [Methanobrevibacter smithii ATCC 35061] | yes |
| Cluster 1888 | hypothetical protein Msm_0546 [Methanobrevibacter smithii ATCC 35061] | yes |
| Cluster 1933 | hypothetical protein Msm_1199 [Methanobrevibacter smithii ATCC 35061] | yes |
| Cluster 1943 | hypothetical protein Msm_1470 [Methanobrevibacter smithii ATCC 35061] | Marginal/no |
| | | expression |
| Cluster 2011 | hypothetical protein Msm_0003 [Methanobrevibacter smithii ATCC 35061] | yes |
| Cluster 2016 | hypothetical protein Msm_0698 [Methanobrevibacter smithii ATCC 35061] | yes |
| Cluster 2030 | hypothetical protein Msm_0180 [Methanobrevibacter smithii ATCC 35061] | yes |
| Cluster 2035 | hypothetical protein Msm_1255 [Methanobrevibacter smithii ATCC 35061] | yes |
| Cluster 2052 | hypothetical protein Msm_0712 [Methanobrevibacter smithii ATCC 35061] | yes |
| Cluster 2069 | hypothetical protein Msm_1509 [Methanobrevibacter smithii ATCC 35061] | yes |
| Cluster 2089 | hypothetical protein Msm_0454 [Methanobrevibacter smithii ATCC 35061] | yes |
| Cluster 2134 | hypothetical protein Msm_0139 [Methanobrevibacter smithii ATCC 35061] | yes |
| Cluster 2169 | hypothetical protein Msm_0098 [Methanobrevibacter smithii ATCC 35061] | yes |
| Cluster 2174 | hypothetical protein Msm_0005 [Methanobrevibacter smithii ATCC 35061] | yes |
| Cluster 2181 | hypothetical protein Msm_0442 [Methanobrevibacter smithii ATCC 35061] | yes |
| Cluster 2206 | hypothetical protein Msm_0211 [Methanobrevibacter smithii ATCC 35061] | yes |
| Cluster 2269 | hypothetical protein Msm_0667 [Methanobrevibacter smithii ATCC 35061] | yes |
| Cluster 2299 | hypothetical protein Msm_1697 [Methanobrevibacter smithii ATCC 35061] | yes |
| Cluster 2338 | hypothetical protein Msm_0685 [Methanobrevibacter smithii ATCC 35061] | Marginal |
| Cluster 2390 | hypothetical protein Msm_1563 [Methanobrevibacter smithii ATCC 35061] | yes |
| Cluster 2402 | putative monovalent cation/H+ antiporter subunit F [Methanobrevibacter smithii ATCC | |
| | 35061] | |
| Cluster 2427 | hypothetical protein Msm_0366 [Methanobrevibacter smithii ATCC 35061] | yes |
| Cluster 2491 | hypothetical protein Msm_0478 [Methanobrevibacter smithii ATCC 35061] | Marginal |
| Cluster 2521 | hypothetical protein Msm_0587 [Methanobrevibacter smithii ATCC 35061] | yes |
| Cluster 2545 | hypothetical protein Msm_1605 [Methanobrevibacter smithii ATCC 35061] | Marginal |
| Cluster 2579 | hypothetical protein Msm_0658 [Methanobrevibacter smithii ATCC 35061] | Marginal |
| Cluster 2590 | hypothetical protein Msm_0278 [Methanobrevibacter smithii ATCC 35061] | Marginal |
| Cluster 2595 | ferredoxin [Methanobrevibacter smithii ATCC 35061] | |
| Cluster 2597 | preprotein translocase subunit SecE [Methanobrevibacter smithii ATCC 35061] | |
| Cluster 2606 | hypothetical protein Msm_1163 [Methanobrevibacter smithii ATCC 35061] | Marginal |
| Cluster 2617 | hypothetical protein Msm_0782 [Methanobrevibacter smithii ATCC 35061] | yes |
| Cluster 2807 | rubredoxin [Methanobrevibacter smithii ATCC 35061] | |
| Cluster 551 | glycerol-3-phosphate cytidyltransferase, TagD [Methanobrevibacter smithii ATCC | |
| | 35061] | |
| Cluster 573 | hypothetical protein Msm_1543 [Methanobrevibacter smithii ATCC 35061] | yes |
| Cluster 591 | ATPase [Methanobrevibacter smithii ATCC 35061] | |
| Cluster 810 | integrase-recombinase protein [Methanobrevibacter smithii ATCC 35061] | |

*Blastp threshold E < 10-10; methanogenic species used for the analysis: Methanobrevibacter_ruminantium_M1, Methanocaldococcus_FS406_22, Methanocaldococcus_fervens_AG86, Methanocaldococcus_infernus_ME, Methanocaldococcus_jannaschii_DSM_2661, Methanocaldococcus_vulcanius_M7, Methanocella_paludicola_SANAE, Methanococcoides_burtonii_DSM_6242, Methanococcus_aeolicus_Nankai_3, Methanococcus_maripaludis_C5, Methanococcus_maripaludis_C6, Methanococcus_maripaludis_C7, Methanococcus_maripaludis_S2, Methanococcus_vannielii_SB, Methanococcus_voltae_A3, Methanocorpusculum_labreanum_Z, Methanoculleus_marisnigri_JR1, Methanohalobium_evestigatum_Z_7303, Methanohalophilus_mahii_DSM_5219, Methanoplanus_petrolearius_DSM_11571, Methanopyrus_kandleri_AV19, Methanosaeta_thermophila_PT, Methanosarcina_acetivorans_C2A, Methanosarcina_barkeri_Fusaro, Methanosarcina_mazei_Go1, Methanosphaera_stadtmanae_DSM_3091, Methanosphaerula_palustris_E1_9c, Methanospirillum_hungatei_JF_1, Methanothermobacter_marburgensis_Marburg, Methanothermobacter_thermautotrophicus_Delta_H, Methanothermus_fervidus_DSM_2088. Genome sequences were downloaded from NCBI website

TABLE 31
Genes regulated by formate concentration by strain

| | | Normalized RNA-Seq counts | | | |
|---|---|---|---|---|---|
| | | High | Low | fold | |
| Gene | Annotation | formate | formate | change | PPDE(p) |
| Msm1453 | hypothetical protein | 90.1 | 253.2 | 2.81 | 0.9929 |
| Msm1119 | hypothetical protein | 1965.4 | 3984.0 | 2.03 | 0.9918 |
| Msm1488 | cobalt ABC transporter, permease | 869.1 | 1763.4 | 2.03 | 0.9902 |
| | component, CbiM | | | | |
| Msm1649 | hypothetical protein | 126.8 | 39.6 | −3.20 | 0.9858 |
| Msm0585 | cobalt ABC transporter, permease | 131.5 | 320.6 | 2.44 | 0.9853 |
| | component, CbiQ | | | | |
| Msm1306 | adhesin-like protein (Cluster 86) | 93.3 | 208.0 | 2.23 | 0.9841 |
| Msm0957 | adhesin-like protein (Cluster 287) | 731.2 | 1805.1 | 2.47 | 0.9759 |
| Msm0051 | adhesin-like protein (Cluster 133) | 2412.7 | 6249.6 | 2.59 | 0.9755 |
| Msm1747 | type II restriction enzyme, methylase | 52.6 | 110.5 | 2.10 | 0.9722 |
| | subunit | | | | |
| METSMITS146E_0738 | hypothetical protein | 3740.8 | 1409.7 | −2.65 | 0.9999 |
| METSMITS146E_0960 | GTPase of unknown function | 430.6 | 185.3 | −2.32 | 0.9994 |
| METSMITS146E_1448 | 4Fe—4S binding domain | 6952.5 | 13982.6 | 2.01 | 0.9973 |
| METSMITS146E_0599 | ABC transporter | 88.7 | 30.9 | −2.87 | 0.9967 |
| METSMITS146E_0243 | hypothetical protein | 59.3 | 233.1 | 3.93 | 0.9953 |
| METSMITS146E_0461 | hypothetical protein | 267.2 | 73.7 | −3.63 | 0.9948 |
| METSMITS146E_1097 | Tetrahydromethanopterin S- | 3051.2 | 7097.8 | 2.33 | 0.9942 |
| | methyltransferase | | | | |
| METSMITS146E_0307 | Carboxymuconolactone decarboxylase | 3318.9 | 1513.6 | −2.19 | 0.9934 |
| | family | | | | |
| METSMITS146E_1103 | Tetrahydromethanopterin S- | 2099.9 | 5557.2 | 2.65 | 0.9883 |
| | methyltransferase, | | | | |
| METSMITS146E_0686 | eRF1 domain 1 | 335.3 | 143.8 | −2.33 | 0.9875 |
| METSMITS146E_0385 | Alcohol dehydrogenase GroES-like domain | 357.5 | 172.6 | −2.07 | 0.9872 |
| METSMITS146E_0783 | Formate/nitrite transporter | 4542.5 | 11725.6 | 2.58 | 0.9862 |
| METSMITS146E_1104 | Tetrahydromethanopterin S- | 2314.3 | 5551.7 | 2.40 | 0.9861 |
| | methyltransferase, | | | | |
| METSMITS146E_1121 | N2,N2-dimethylguanosine tRNA | 290.6 | 137.6 | −2.11 | 0.9840 |
| | methyltransfera | | | | |
| METSMITS146E_0493 | hypothetical protein | 65.0 | 12.0 | −5.43 | 0.9817 |
| METSMITS146E_1244 | hypothetical protein | 208.9 | 90.1 | −2.32 | 0.9778 |
| METSMITS146E_1854 | YLP motif | 34.0 | 9.7 | −3.49 | 0.9753 |
| METSMITS146E_1202 | Bacterial regulatory protein, arsR family | 1344.2 | 326.5 | −4.12 | 0.9744 |
| METSMITS146E_1583 | MarR family | 2807.7 | 1332.7 | −2.11 | 0.9733 |
| METSMITS146E_0848 | Fibronectin-binding protein A N-terminus | 142.8 | 69.0 | −2.07 | 0.9732 |
| | (Fb | | | | |
| METSMITS146E_0278 | Pyridoxal-phosphate dependent enzyme | 80.5 | 33.0 | −2.44 | 0.9726 |
| METSMITS146E_1163 | NADH-ubiquinone/plastoquinone | 527.8 | 1067.8 | 2.02 | 0.9714 |
| | oxidoreduct | | | | |
| METSMITS146E_1164 | hypothetical protein | 262.4 | 529.8 | 2.02 | 0.9707 |
| METSMITS145B_0176 | Lyase | 352.2 | 113.7 | −3.10 | 0.9999999 |
| METSMITS145B_1436 | Chlamydia polymorphic membrane protein | 298.6 | 30.9 | −9.68 | 0.9999996 |
| | (Chl | | | | |
| METSMITS145B_0056 | tRNA synthetases class I (M) | 1177.8 | 308.9 | −3.81 | 0.9999988 |
| METSMITS145B_1144 | Peptidase family M50 | 289.6 | 95.7 | −3.03 | 0.9999983 |
| METSMITS145B_0784 | hypothetical protein | 130.9 | 454.8 | 3.47 | 0.9999942 |
| METSMITS145B_1676 | Thiolase, C-terminal domain | 2052.7 | 1019.5 | −2.01 | 0.9999928 |
| METSMITS145B_1188 | hypothetical protein | 4813.1 | 911.2 | −5.28 | 0.9999909 |
| METSMITS145B_0880 | Ribosomal protein S5, N-terminal domai | 563.5 | 145.1 | −3.88 | 0.9999902 |
| METSMITS145B_1454 | Protein of unknown function DUF75 | 362.4 | 112.3 | −3.23 | 0.9999869 |
| METSMITS145B_1212 | KH domain | 2266.0 | 536.7 | −4.22 | 0.9999837 |
| METSMITS145B_0374 | hypothetical protein | 817.0 | 295.3 | −2.77 | 0.9999826 |
| METSMITS145B_1216 | RNA polymerase Rpb2, domain 6 | 457.5 | 92.3 | −4.96 | 0.9999824 |
| METSMITS145B_0870 | TruB family pseudouridylate synthase (N | 261.4 | 45.0 | −5.81 | 0.9999807 |
| | term | | | | |
| METSMITS145B_0187 | Nucleoside diphosphate kinase | 1403.1 | 224.9 | −6.24 | 0.9999804 |
| METSMITS145B_0847 | GHMP kinases N terminal domain | 279.7 | 83.4 | −3.35 | 0.9999792 |
| METSMITS145B_0067 | Thiamine pyrophosphate enzyme, C- | 1382.7 | 387.2 | −3.57 | 0.9999792 |
| | termina | | | | |
| METSMITS145B_0414 | Permease family | 515.1 | 186.2 | −2.77 | 0.9999771 |
| METSMITS145B_0185 | Ribosomal protein S6e | 677.9 | 155.1 | −4.37 | 0.9999756 |
| METSMITS145B_1306 | Ribosomal protein L16p/L10e | 1838.1 | 517.9 | −3.55 | 0.9999755 |
| METSMITS145B_0901 | Ribosomal protein L3 | 894.0 | 183.9 | −4.86 | 0.9999753 |
| METSMITS145B_0387 | Glutamine amidotransferases class-II | 726.5 | 116.9 | −6.21 | 0.9999752 |
| METSMITS145B_0644 | Ribosomal protein L10 | 5205.4 | 905.5 | −5.75 | 0.9999750 |
| METSMITS145B_0184 | Elongation factor Tu GTP binding domain | 851.1 | 202.3 | −4.21 | 0.9999750 |
| METSMITS145B_1737 | Cobalt transport protein component CbiN | 6656.3 | 2065.1 | −3.22 | 0.9999708 |
| METSMITS145B_0799 | Ribosomal protein S8e | 4787.9 | 895.1 | −5.35 | 0.9999677 |
| METSMITS145B_1215 | RNA polymerase Rpb1, domain 2 | 508.8 | 133.9 | −3.80 | 0.9999634 |
| METSMITS145B_1438 | CobN/Magnesium Chelatase | 489.4 | 194.0 | −2.52 | 0.9999603 |
| METSMITS145B_1077 | Hsp20/alpha crystallin family | 2923.3 | 5909.2 | 2.02 | 0.9999597 |
| METSMITS145B_0242 | MarR family | 2774.0 | 7441.9 | 2.68 | 0.9999571 |
| METSMITS145B_1847 | hypothetical protein | 164.0 | 17.6 | −9.29 | 0.9999571 |
| METSMITS145B_0895 | KH domain | 543.1 | 145.8 | −3.72 | 0.9999558 |
| METSMITS145B_0385 | Conserved region in glutamate synthase | 1020.6 | 257.5 | −3.96 | 0.9999548 |
| METSMITS145B_0920 | Fibronectin-binding protein A N-terminus | 143.5 | 59.5 | −2.41 | 0.9999506 |
| | (Fb | | | | |
| METSMITS145B_1828 | Ferritin-like domain | 4084.7 | 13266.8 | 3.25 | 0.9999480 |
| METSMITS145B_0055 | Protein of unknown function (DUF530) | 590.1 | 158.8 | −3.72 | 0.9999469 |
| METSMITS145B_1456 | Eukaryotic translation initiation factor | 652.6 | 214.8 | −3.04 | 0.9999450 |
| METSMITS145B_1202 | Elongation factor Tu GTP binding domain | 1306.1 | 319.2 | −4.09 | 0.9999449 |
| METSMITS145B_0645 | Ribosomal protein L1p/L10e family | 6968.3 | 1572.0 | −4.43 | 0.9999448 |
| METSMITS145B_1217 | RNA polymerase beta subunit | 553.0 | 113.1 | −4.89 | 0.9999402 |
| METSMITS145B_0860 | Ribosomal protein S13/S18 | 1428.8 | 335.2 | −4.26 | 0.9999378 |
| METSMITS145B_0585 | Binding-protein-dependent transport syst | 1242.9 | 168.7 | −7.37 | 0.9999323 |
| METSMITS145B_0125 | M42 glutamyl aminopeptidase | 1233.1 | 419.3 | −2.94 | 0.9999312 |
| METSMITS145B_1525 | Protein of unknown function (DUF521) | 785.5 | 268.9 | −2.92 | 0.9999263 |
| METSMITS145B_1214 | RNA polymerase Rpb1, domain 5 | 2850.7 | 471.7 | −6.04 | 0.9999254 |
| METSMITS145B_0060 | Eukaryotic and archaeal DNA primase sma | 589.9 | 282.4 | −2.09 | 0.9999223 |
| METSMITS145B_0655 | Tetrahydromethanopterin S- | 3532.9 | 573.1 | −6.16 | 0.9999221 |
| | methyltransferase | | | | |
| METSMITS145B_1569 | Carbonic anhydrase | 5284.9 | 11711.4 | 2.22 | 0.9999208 |
| METSMITS145B_1433 | DnaJ domain | 351.4 | 114.3 | −3.07 | 0.9999192 |
| METSMITS145B_0851 | Enolase, C-terminal TIM barrel domain | 243.2 | 50.1 | −4.86 | 0.9999189 |
| METSMITS145B_1203 | Ribosomal protein S7p/S5e | 863.9 | 222.6 | −3.88 | 0.9999147 |
| METSMITS145B_0646 | Ribosomal protein L11, N-terminal dom | 2943.1 | 909.8 | −3.24 | 0.9999070 |
| METSMITS145B_0065 | Radical SAM superfamily | 1138.1 | 394.6 | −2.88 | 0.9999007 |
| METSMITS145B_1200 | Ribosomal protein S10p/S20e | 1683.7 | 511.8 | −3.29 | 0.9998999 |
| METSMITS145B_0845 | FMN-dependent dehydrogenase | 184.0 | 47.6 | −3.87 | 0.9998983 |
| METSMITS145B_0317 | Ribosomal L15 | 2318.5 | 804.7 | −2.88 | 0.9998920 |
| METSMITS145B_0584 | hypothetical protein | 603.8 | 65.7 | −9.19 | 0.9998727 |
| METSMITS145B_0780 | MotA/TolQ/ExbB proton channel family | 203.1 | 547.6 | 2.70 | 0.9998725 |
| METSMITS145B_0053 | hypothetical protein | 415.8 | 1428.8 | 3.44 | 0.9998667 |
| METSMITS145B_0126 | Coenzyme F420 | 1760.1 | 505.3 | −3.48 | 0.9998661 |
| | hydrogenase/dehydrogenase, | | | | |
| METSMITS145B_0582 | ABC transporter | 981.0 | 134.7 | −7.28 | 0.9998638 |
| METSMITS145B_1526 | DHH family | 434.8 | 102.7 | −4.23 | 0.9998629 |
| METSMITS145B_0973 | TCP-1/cpn60 chaperonin family | 2008.9 | 543.5 | −3.70 | 0.9998577 |
| METSMITS145B_1168 | hypothetical protein | 152.5 | 43.1 | −3.54 | 0.9998449 |
| METSMITS145B_0857 | RNA polymerase Rpb3/RpoA insert | 917.6 | 186.2 | −4.93 | 0.9998397 |
| | domain | | | | |
| METSMITS145B_0249 | DHH family | 387.9 | 186.1 | −2.08 | 0.9998334 |
| METSMITS145B_0763 | Glutamine synthetase, catalytic domain | 3520.8 | 1064.5 | −3.31 | 0.9998141 |
| METSMITS145B_1495 | hypothetical protein | 22.7 | 55.2 | 2.44 | 0.9998125 |
| METSMITS145B_1572 | Aspartate/ornithine carbamoyltransferase, | 475.6 | 149.2 | −3.19 | 0.9998077 |
| | As | | | | |
| METSMITS145B_0709 | Aminotransferase class-V | 3124.1 | 1317.0 | −2.37 | 0.9998010 |
| METSMITS145B_0504 | CBS domain pair | 844.3 | 420.0 | −2.01 | 0.9997991 |
| METSMITS145B_0186 | Elongation factor Tu GTP binding domain | 1355.8 | 217.8 | −6.22 | 0.9997922 |
| METSMITS145B_1383 | hypothetical protein | 257.4 | 72.7 | −3.54 | 0.9997910 |
| METSMITS145B_0739 | Ribosomal protein S19e | 1414.1 | 295.0 | −4.79 | 0.9997828 |
| METSMITS145B_0876 | hypothetical protein | 564.2 | 184.2 | −3.06 | 0.9997722 |
| METSMITS145B_1314 | adhesin-like protein (Cluster 199) | 181.4 | 41.6 | −4.36 | 0.9997633 |
| METSMITS145B_1189 | Glutamate/Leucine/Phenylalanine/Valin | 3763.6 | 842.9 | −4.46 | 0.9997607 |
| METSMITS145B_0737 | hypothetical protein | 1476.0 | 249.9 | −5.91 | 0.9997553 |
| METSMITS145B_0783 | Cna protein B-type domain | 406.0 | 2803.3 | 6.90 | 0.9997532 |
| METSMITS145B_0855 | Ribosomal protein L13 | 817.1 | 154.2 | −5.30 | 0.9997492 |
| METSMITS145B_1213 | Ribosomal protein L7Ae/L30e/S12e/Gadd4 | 2448.7 | 494.7 | −4.95 | 0.9997411 |
| METSMITS145B_0750 | haloacid dehalogenase-like hydrolase | 1233.6 | 352.2 | −3.50 | 0.9997362 |
| METSMITS145B_0388 | SNO glutamine amidotransferase family | 987.2 | 172.5 | −5.72 | 0.9997182 |
| METSMITS145B_0486 | Mov34/MPN/PAD-1 family | 164.5 | 61.4 | −2.68 | 0.9997154 |
| METSMITS145B_0586 | hypothetical protein | 5082.5 | 618.0 | −8.22 | 0.9997120 |
| METSMITS145B_0814 | CoA binding domain | 1264.6 | 377.6 | −3.35 | 0.9997018 |
| METSMITS145B_0188 | Ribosomal protein L24e | 1296.2 | 242.6 | −5.34 | 0.9996973 |
| METSMITS145B_1747 | IMP dehydrogenase/GMP reductase | 484.8 | 161.0 | −3.01 | 0.9996970 |
| | domain | | | | |
| METSMITS145B_0066 | hypothetical protein | 2898.0 | 780.7 | −3.71 | 0.9996914 |
| METSMITS145B_1665 | hypothetical protein | 154.4 | 380.2 | 2.46 | 0.9996806 |
| METSMITS145B_0858 | Ribosomal protein S11 | 909.4 | 201.7 | −4.51 | 0.9996784 |
| METSMITS145B_0902 | Uncharacterized ACR, COG2106 | 1763.8 | 633.2 | −2.79 | 0.9996432 |
| METSMITS145B_0449 | BioY family | 1347.2 | 570.2 | −2.36 | 0.9996428 |
| METSMITS145B_1776 | hypothetical protein | 270.2 | 775.6 | 2.87 | 0.9996396 |
| METSMITS145B_0995 | Aconitase C-terminal domain | 435.5 | 153.2 | −2.84 | 0.9996190 |
| METSMITS145B_0115 | hypothetical protein | 1003.7 | 292.8 | −3.43 | 0.9996127 |
| METSMITS145B_0190 | Ribosomal protein L7Ae/L30e/S12e/Gadd4 | 2003.0 | 486.0 | −4.12 | 0.9996116 |
| METSMITS145B_1613 | CDC6, C terminal | 282.9 | 105.3 | −2.69 | 0.9996114 |
| METSMITS145B_0477 | hypothetical protein | 251.0 | 99.3 | −2.53 | 0.9995923 |
| METSMITS145B_0734 | eIF-6 family | 1958.1 | 526.3 | −3.72 | 0.9995904 |
| METSMITS145B_1291 | hypothetical protein | 1348.3 | 4333.5 | 3.21 | 0.9995674 |
| METSMITS145B_1267 | Topoisomerase VI B subunit, transducer | 312.3 | 139.2 | −2.24 | 0.9995495 |
| METSMITS145B_0854 | Ribosomal protein S9/S16 | 758.5 | 180.4 | −4.20 | 0.9995292 |
| METSMITS145B_0581 | PhoU domain | 637.5 | 75.6 | −8.43 | 0.9995225 |
| METSMITS145B_1458 | Ribosomal protein L44 | 1860.0 | 750.1 | −2.48 | 0.9995215 |
| METSMITS145B_0647 | KOW motif | 3352.1 | 996.4 | −3.36 | 0.9995023 |
| METSMITS145B_0656 | Domain of unknown function (DUF1867) | 666.4 | 1352.6 | 2.03 | 0.9994987 |
| METSMITS145B_1359 | Proteasome A-type and B-type | 1175.0 | 339.2 | −3.46 | 0.9994870 |
| METSMITS145B_0859 | S4 domain | 913.7 | 172.1 | −5.31 | 0.9994849 |
| METSMITS145B_0692 | Ribosomal S3Ae family | 3724.4 | 1025.3 | −3.63 | 0.9994778 |
| METSMITS145B_1434 | DnaJ C terminal region | 606.2 | 119.8 | −5.06 | 0.9994702 |
| METSMITS145B_1685 | hypothetical protein | 461.3 | 210.2 | −2.19 | 0.9994676 |
| METSMITS145B_1661 | Periplasmic binding protein | 154.4 | 366.7 | 2.38 | 0.9994386 |
| METSMITS145B_1631 | hypothetical protein | 1793.0 | 754.3 | −2.38 | 0.9994340 |
| METSMITS145B_1120 | hypothetical protein | 123.6 | 398.8 | 3.23 | 0.9994298 |
| METSMITS145B_1455 | Nucleolar RNA-binding protein, Nop10p | 366.9 | 65.6 | −5.59 | 0.9994282 |
| | family | | | | |
| METSMITS145B_1835 | Uncharacterized conserved protein | 846.0 | 238.5 | −3.55 | 0.9994112 |
| | (DUF2149) | | | | |
| METSMITS145B_0843 | Polyprenyl synthetase | 303.9 | 124.2 | −2.45 | 0.9994048 |
| METSMITS145B_0711 | hypothetical protein | 86.5 | 391.4 | 4.52 | 0.9994019 |
| METSMITS145B_0275 | adhesin-like protein (Cluster 317) | 252.8 | 976.3 | 3.86 | 0.9993871 |
| METSMITS145B_0900 | Ribosomal protein L4/L1 family | 559.6 | 135.5 | −4.13 | 0.9993812 |
| METSMITS145B_0817 | Adenylosuccinate synthetase | 758.6 | 197.3 | −3.84 | 0.9993764 |
| METSMITS145B_0054 | hypothetical protein | 411.8 | 157.2 | −2.62 | 0.9993431 |
| METSMITS145B_1531 | Glycoprotease family | 208.9 | 431.2 | 2.06 | 0.9993307 |
| METSMITS145B_0415 | Phosphoribosyl transferase domain | 763.7 | 174.7 | −4.37 | 0.9993204 |
| METSMITS145B_0228 | 3′ exoribonuclease family, domain 1 | 618.2 | 209.4 | −2.95 | 0.9992944 |
| METSMITS145B_1749 | Ribosomal L37ae protein family | 2003.5 | 944.9 | −2.12 | 0.9992646 |
| METSMITS145B_0896 | Ribosomal protein L22p/L17e | 1031.7 | 317.7 | −3.25 | 0.9992573 |
| METSMITS145B_1585 | tRNA synthetases class II (D, K and N) | 489.8 | 178.9 | −2.74 | 0.9992398 |
| METSMITS145B_1060 | Staphylococcal nuclease homologue | 773.1 | 1570.0 | 2.03 | 0.9992376 |
| METSMITS145B_0898 | Ribosomal Proteins L2, C-terminal doma | 953.7 | 279.8 | −3.41 | 0.9992289 |
| METSMITS145B_1584 | HI0933-like protein | 73.6 | 23.7 | −3.11 | 0.9992283 |
| METSMITS145B_1307 | ABC transporter | 65.7 | 15.2 | −4.31 | 0.9992127 |
| METSMITS145B_0829 | Aminotransferase class I and II | 575.1 | 266.6 | −2.16 | 0.9992114 |
| METSMITS145B_0844 | Metallo-beta-lactamase superfamily | 268.7 | 66.2 | −4.06 | 0.9991340 |
| METSMITS145B_0189 | Ribosomal protein S28e | 1819.2 | 324.7 | −5.60 | 0.9991304 |
| METSMITS145B_0178 | Ribosomal protein S24e | 1310.5 | 545.1 | −2.40 | 0.9991251 |
| METSMITS145B_0199 | tRNA synthetases class I (W and Y) | 340.6 | 113.2 | −3.01 | 0.9991108 |
| METSMITS145B_0204 | TCP-1/cpn60 chaperonin family | 1542.1 | 483.0 | −3.19 | 0.9990865 |
| METSMITS145B_0732 | Prefoldin subunit | 1034.8 | 453.6 | −2.28 | 0.9990781 |
| METSMITS145B_1352 | hypothetical protein | 1820.2 | 541.5 | −3.36 | 0.9990488 |
| METSMITS145B_0505 | Universal stress protein family | 3104.8 | 7598.8 | 2.45 | 0.9990446 |
| METSMITS145B_1238 | FKBP-type peptidyl-prolyl cis-trans | 902.4 | 213.9 | −4.22 | 0.9990183 |
| | isomeras | | | | |
| METSMITS145B_0014 | hypothetical protein | 286.4 | 808.0 | 2.82 | 0.9990161 |
| METSMITS145B_0356 | PET112 family, N terminal region | 291.8 | 106.4 | −2.74 | 0.9990137 |
| METSMITS145B_1113 | hypothetical protein | 712.6 | 291.6 | −2.44 | 0.9989838 |
| METSMITS145B_1143 | MoeA N-terminal region (domain I and II | 493.6 | 191.3 | −2.58 | 0.9989256 |
| METSMITS145B_0386 | GXGXG motif | 914.6 | 223.2 | −4.10 | 0.9989225 |
| METSMITS145B_1748 | IMP dehydrogenase/GMP reductase | 769.7 | 339.6 | −2.27 | 0.9989211 |
| | domain | | | | |
| METSMITS145B_1736 | Cobalt uptake substrate-specific | 3330.3 | 912.2 | −3.65 | 0.9989004 |
| | transmembra | | | | |
| METSMITS145B_0888 | Ribosomal family S4e | 313.8 | 77.7 | −4.04 | 0.9988336 |
| METSMITS145B_1818 | FAD binding domain | 1018.4 | 482.3 | −2.11 | 0.9988300 |
| METSMITS145B_0506 | Amidohydrolase family | 193.8 | 399.2 | 2.06 | 0.9988200 |
| METSMITS145B_0968 | PRC-barrel domain | 1888.1 | 4744.9 | 2.51 | 0.9988084 |
| METSMITS145B_1141 | tRNA synthetases class I (I, L, M and V) | 304.8 | 146.7 | −2.08 | 0.9987920 |
| METSMITS145B_0933 | CBS domain pair | 1036.5 | 2349.7 | 2.27 | 0.9987890 |
| METSMITS145B_1093 | adhesin-like protein (Cluster 222) | 757.7 | 312.1 | −2.43 | 0.9987764 |
| METSMITS145B_1360 | Metallo-beta-lactamase superfamily | 142.6 | 42.4 | −3.36 | 0.9987727 |
| METSMITS145B_1174 | RNA polymerase Rpb4 | 1196.9 | 381.6 | −3.14 | 0.9987565 |
| METSMITS145B_0144 | 2,3-bisphosphoglycerate-independent pho | 707.8 | 319.3 | −2.22 | 0.9987488 |
| METSMITS145B_1660 | FdhD/NarQ family | 72.9 | 187.5 | 2.57 | 0.9987478 |
| METSMITS145B_0290 | CAAX amino terminal protease family | 935.2 | 448.3 | −2.09 | 0.9987370 |
| METSMITS145B_0106 | hypothetical protein | 940.3 | 466.0 | −2.02 | 0.9987099 |
| METSMITS145B_1602 | Amidase | 339.2 | 162.6 | −2.09 | 0.9986677 |
| METSMITS145B_0764 | Domain of unknown function DUF128 | 545.8 | 161.1 | −3.39 | 0.9986243 |
| METSMITS145B_0534 | NMD3 family | 326.3 | 129.9 | −2.51 | 0.9985967 |
| METSMITS145B_1656 | ThiC family | 5845.1 | 2037.2 | −2.87 | 0.9985545 |
| METSMITS145B_1262 | MoeA N-terminal region (domain I and II | 191.0 | 84.3 | −2.27 | 0.9985525 |
| METSMITS145B_0217 | hypothetical protein | 190.8 | 1685.3 | 8.83 | 0.9985134 |
| METSMITS145B_1204 | Ribosomal protein S12 | 930.4 | 310.1 | −3.00 | 0.9984510 |
| METSMITS145B_1738 | Cobalt transport protein | 276.5 | 79.6 | −3.48 | 0.9984390 |
| METSMITS145B_0544 | Peptidase family U32 | 172.8 | 84.6 | −2.04 | 0.9984250 |
| METSMITS145B_0832 | hypothetical protein | 261.7 | 64.1 | −4.08 | 0.9984085 |
| METSMITS145B_0894 | Ribosomal L29 protein | 433.4 | 92.5 | −4.68 | 0.9984004 |
| METSMITS145B_0887 | ribosomal L5P family C-terminus | 436.3 | 99.8 | −4.37 | 0.9983973 |
| METSMITS145B_1249 | Conserved carboxylase domain | 1286.5 | 569.9 | −2.26 | 0.9983772 |
| METSMITS145B_1123 | ABC-2 type transporter | 253.3 | 118.2 | −2.14 | 0.9983630 |
| METSMITS145B_0070 | Cysteine-rich domain | 211.0 | 457.7 | 2.17 | 0.9983307 |
| METSMITS145B_0738 | Double-stranded DNA-binding domain | 2332.3 | 1120.4 | −2.08 | 0.9983227 |
| METSMITS145B_0166 | LSM domain | 2243.6 | 712.9 | −3.15 | 0.9983088 |
| METSMITS145B_0177 | Ribosomal protein S27a | 732.1 | 281.9 | −2.60 | 0.9983070 |
| METSMITS145B_0183 | hypothetical protein | 193.9 | 34.7 | −5.59 | 0.9982994 |
| METSMITS145B_0892 | Domain of unknown function UPF0086 | 444.7 | 65.1 | −6.83 | 0.9982397 |
| METSMITS145B_0741 | RNAse P Rpr2/Rpp21/SNM1 subunit | 2696.9 | 777.6 | −3.47 | 0.9982195 |
| | domain | | | | |
| METSMITS145B_0154 | adhesin-like protein (Cluster 92) | 55.7 | 120.1 | 2.16 | 0.9982156 |
| METSMITS145B_0595 | NIF3 (NGG1p interacting factor 3) | 153.5 | 47.2 | −3.25 | 0.9982128 |
| METSMITS145B_0747 | DNA topoisomerase | 235.6 | 107.2 | −2.20 | 0.9981900 |
| METSMITS145B_0406 | ACT domain | 363.3 | 771.6 | 2.12 | 0.9981515 |
| METSMITS145B_0503 | hypothetical protein | 347.7 | 142.0 | −2.45 | 0.9981511 |
| METSMITS145B_0875 | Integral membrane protein DUF106 | 726.1 | 150.6 | −4.82 | 0.9981432 |
| METSMITS145B_0740 | CRS1/YhbY (CRM) domain | 2241.9 | 303.2 | −7.40 | 0.9980914 |
| METSMITS145B_0035 | 2′,5′ RNA ligase family | 229.0 | 87.6 | −2.61 | 0.9979889 |
| METSMITS145B_0268 | hypothetical protein | 36.2 | 103.1 | 2.85 | 0.9979688 |
| METSMITS145B_0179 | Protein of unknown function (DUF359) | 952.4 | 388.4 | −2.45 | 0.9979441 |
| METSMITS145B_0883 | Ribosomal protein L32 | 477.7 | 120.5 | −3.97 | 0.9979379 |
| METSMITS145B_0884 | Ribosomal protein L6 | 448.3 | 125.7 | −3.57 | 0.9979229 |
| METSMITS145B_1457 | Ribosomal protein S27 | 1013.8 | 378.9 | −2.68 | 0.9977081 |
| METSMITS145B_0980 | hypothetical protein | 2545.5 | 1171.2 | −2.17 | 0.9976843 |
| METSMITS145B_1092 | hypothetical protein | 658.7 | 278.5 | −2.37 | 0.9976820 |
| METSMITS145B_1163 | 8-oxoguanine DNA glycosylase, N-terminal | 80.8 | 31.3 | −2.58 | 0.9976816 |
| | dom | | | | |
| METSMITS145B_1518 | Nitrogen regulatory protein P-II | 1068.9 | 139.1 | −7.69 | 0.9976814 |
| METSMITS145B_0220 | Nitrogen regulatory protein P-II | 1068.9 | 139.1 | −7.69 | 0.9976814 |
| METSMITS145B_1850 | Rubrerythrin | 4998.3 | 14204.1 | 2.84 | 0.9975017 |
| METSMITS145B_1313 | hypothetical protein | 70.1 | 19.9 | −3.52 | 0.9974803 |
| METSMITS145B_1430 | GrpE | 141.5 | 33.7 | −4.19 | 0.9974753 |
| METSMITS145B_0579 | 4Fe—4S binding domain | 194.2 | 59.6 | −3.26 | 0.9974621 |
| METSMITS145B_0624 | hypothetical protein | 276.1 | 96.5 | −2.86 | 0.9973842 |
| METSMITS145B_0380 | hypothetical protein | 50.7 | 23.7 | −2.14 | 0.9973443 |
| METSMITS145B_0181 | RNA polymerase Rpb7-like, N-terminal d | 1063.1 | 433.0 | −2.46 | 0.9973353 |
| METSMITS145B_0889 | KOW motif | 942.2 | 281.6 | −3.35 | 0.9971608 |
| METSMITS145B_0423 | hypothetical protein | 681.3 | 320.1 | −2.13 | 0.9970890 |
| METSMITS145B_1565 | hypothetical protein | 423.6 | 865.4 | 2.04 | 0.9970848 |
| METSMITS145B_0288 | ABC transporter | 268.3 | 126.6 | −2.12 | 0.9970833 |
| METSMITS145B_0877 | eubacterial secY protein | 1062.7 | 445.0 | −2.39 | 0.9970693 |
| METSMITS145B_1431 | Hsp70 protein | 642.9 | 256.0 | −2.51 | 0.9969834 |
| METSMITS145B_1605 | 3,4-dihydroxy-2-butanone 4-phosphate sy | 554.2 | 202.0 | −2.74 | 0.9968535 |
| METSMITS145B_1410 | Sir2 family | 284.3 | 121.8 | −2.33 | 0.9968306 |
| METSMITS145B_0760 | S-adenosyl-L-homocysteine hydrolase, NA | 854.7 | 368.6 | −2.32 | 0.9967602 |
| METSMITS145B_0059 | hypothetical protein | 386.7 | 167.5 | −2.31 | 0.9967564 |
| METSMITS145B_1444 | Hydrogenase maturation protease | 3568.0 | 7435.4 | 2.08 | 0.9966401 |
| METSMITS145B_1096 | Chlamydia polymorphic membrane protein | 98.6 | 31.9 | −3.09 | 0.9966163 |
| | (Chl | | | | |
| METSMITS145B_0856 | Ribosomal protein L15 | 858.0 | 178.6 | −4.80 | 0.9965206 |
| METSMITS145B_0848 | Memo-like protein | 132.2 | 45.9 | −2.88 | 0.9964448 |
| METSMITS145B_0872 | hypothetical protein | 2094.6 | 460.3 | −4.55 | 0.9963996 |
| METSMITS145B_0949 | ABC transporter | 415.5 | 156.6 | −2.65 | 0.9963777 |
| METSMITS145B_0427 | hypothetical protein | 520.9 | 161.3 | −3.23 | 0.9963302 |
| METSMITS145B_1302 | Pyridoxal-dependent decarboxylase conse | 136.5 | 37.9 | −3.60 | 0.9962536 |
| METSMITS145B_1538 | methylene-5,6,7,8- | 8996.2 | 24598.8 | 2.73 | 0.9962188 |
| | tetrahydromethanopterin de | | | | |
| METSMITS145B_0576 | Pyruvate flavodoxin/ferredoxin oxidor | 851.8 | 401.3 | −2.12 | 0.9958999 |
| METSMITS145B_1496 | hypothetical protein | 438.9 | 1271.5 | 2.90 | 0.9958583 |
| METSMITS145B_1222 | Thiamine monophosphate synthase/TENI | 152.4 | 50.0 | −3.05 | 0.9957322 |
| METSMITS145B_0052 | hypothetical protein | 184.2 | 546.8 | 2.97 | 0.9957191 |
| METSMITS145B_0948 | Initiation factor 2 subunit family | 476.7 | 221.5 | −2.15 | 0.9956836 |
| METSMITS145B_0964 | Domain of unknown function (DUF1724) | 37.1 | 148.0 | 3.99 | 0.9954538 |
| METSMITS145B_1739 | ABC transporter | 181.6 | 52.0 | −3.49 | 0.9954323 |
| METSMITS145B_1136 | Serine hydroxymethyltransferase | 720.1 | 334.8 | −2.15 | 0.9953723 |
| METSMITS145B_0497 | hypothetical protein | 185.6 | 88.8 | −2.09 | 0.9953688 |
| METSMITS145B_1308 | Substrate binding domain of ABC-type gly | 52.1 | 13.4 | −3.90 | 0.9950982 |
| METSMITS145B_0623 | hypothetical protein | 5695.6 | 1596.0 | −3.57 | 0.9950323 |
| METSMITS145B_1481 | tRNA pseudouridine synthase D (TruD) | 203.1 | 100.0 | −2.03 | 0.9949935 |
| METSMITS145B_1750 | Brix domain | 264.3 | 78.2 | −3.38 | 0.9949691 |
| METSMITS145B_0062 | Thymidylate kinase | 328.9 | 136.9 | −2.40 | 0.9949192 |
| METSMITS145B_0266 | Anticodon-binding domain | 554.3 | 247.9 | −2.24 | 0.9948838 |
| METSMITS145B_0028 | NADP oxidoreductase coenzyme F420- | 732.8 | 1959.3 | 2.67 | 0.9948097 |
| | depe | | | | |
| METSMITS145B_1182 | hypothetical protein | 465.3 | 141.4 | −3.29 | 0.9947834 |
| METSMITS145B_0535 | tRNA synthetases class I (W and Y) | 385.6 | 142.9 | −2.70 | 0.9946715 |
| METSMITS145B_0164 | hypothetical protein | 528.8 | 1108.3 | 2.10 | 0.9946358 |
| METSMITS145B_0853 | RNA polymerases N/8 kDa subunit | 239.1 | 80.0 | −2.99 | 0.9945515 |
| METSMITS145B_1321 | hypothetical protein | 370.5 | 174.2 | −2.13 | 0.9944052 |
| METSMITS145B_1177 | Zinc-binding dehydrogenase | 1040.7 | 6448.2 | 6.20 | 0.9943331 |
| METSMITS145B_0622 | EF-1 guanine nucleotide exchange domain | 641.0 | 252.5 | −2.54 | 0.9942381 |
| METSMITS145B_0660 | PUA domain | 447.6 | 203.6 | −2.20 | 0.9940320 |
| METSMITS145B_0349 | hypothetical protein | 131.9 | 44.8 | −2.94 | 0.9936418 |
| METSMITS145B_0879 | Ribosomal protein L30p/L7e | 559.9 | 206.9 | −2.71 | 0.9935049 |
| METSMITS145B_0063 | hypothetical protein | 359.4 | 133.5 | −2.69 | 0.9934970 |
| METSMITS145B_0583 | hypothetical protein | 1081.9 | 205.1 | −5.27 | 0.9933050 |
| METSMITS145B_1269 | Type IIB DNA topoisomerase | 559.3 | 215.7 | −2.59 | 0.9932221 |
| METSMITS145B_0609 | Ferrous iron transport protein B | 133.3 | 315.1 | 2.36 | 0.9928589 |
| METSMITS145B_0897 | Ribosomal protein S19 | 815.1 | 325.5 | −2.50 | 0.9926403 |
| METSMITS145B_1219 | Tetratricopeptide repeat | 12.9 | 43.1 | 3.33 | 0.9924422 |
| METSMITS145B_1394 | NADH-Ubiquinone/plastoquinone (complex | 273.2 | 123.0 | −2.22 | 0.9923872 |
| | I) | | | | |
| METSMITS145B_0022 | Aminotransferase class I and II | 71.4 | 24.3 | −2.94 | 0.9922219 |
| METSMITS145B_0831 | hypothetical protein | 203.4 | 95.8 | −2.12 | 0.9921651 |
| METSMITS145B_0578 | 4Fe—4S binding domain | 869.8 | 397.6 | −2.19 | 0.9921494 |
| METSMITS145B_0735 | Ribosomal protein L31e | 1124.2 | 429.2 | −2.62 | 0.9918193 |
| METSMITS145B_0893 | Translation initiation factor SUI1 | 280.1 | 74.6 | −3.76 | 0.9917441 |
| METSMITS145B_0034 | adhesin-like protein (Cluster 18) | 245.6 | 96.6 | −2.54 | 0.9917377 |
| METSMITS145B_1114 | hypothetical protein | 315.2 | 104.0 | −3.03 | 0.9916374 |
| METSMITS145B_1432 | hypothetical protein | 455.9 | 128.2 | −3.56 | 0.9916028 |
| METSMITS145B_0322 | ABC transporter | 328.2 | 138.0 | −2.38 | 0.9913972 |
| METSMITS145B_0447 | Toprim domain | 498.8 | 245.5 | −2.03 | 0.9909964 |
| METSMITS145B_1825 | hypothetical protein | 71.8 | 27.3 | −2.62 | 0.9909923 |
| METSMITS145B_0749 | hypothetical protein | 475.5 | 158.5 | −3.00 | 0.9907966 |
| METSMITS145B_1356 | YLP motif | 662.5 | 255.6 | −2.59 | 0.9907192 |
| METSMITS145B_1002 | hypothetical protein | 2145.8 | 5907.5 | 2.75 | 0.9903513 |
| METSMITS145B_0524 | hypothetical protein | 92.0 | 200.6 | 2.18 | 0.9901892 |
| METSMITS145B_0246 | hypothetical protein | 68.8 | 27.3 | −2.52 | 0.9899688 |
| METSMITS145B_0891 | Ribosomal protein S17 | 499.7 | 207.6 | −2.41 | 0.9898280 |
| METSMITS145B_0885 | Ribosomal protein S8 | 550.5 | 208.5 | −2.64 | 0.9898115 |
| METSMITS145B_0881 | Ribosomal L18p/L5e family | 841.1 | 349.9 | −2.40 | 0.9896522 |
| METSMITS145B_1752 | Prefoldin subunit | 604.8 | 280.1 | −2.16 | 0.9895336 |
| METSMITS145B_0850 | 4Fe—4S binding domain | 252.8 | 46.8 | −5.40 | 0.9895237 |
| METSMITS145B_1678 | hypothetical protein | 82.5 | 40.2 | −2.06 | 0.9891309 |
| METSMITS145B_1218 | RNA polymerase Rpb5, C-terminal domain | 463.5 | 212.8 | −2.18 | 0.9886263 |
| METSMITS145B_0537 | hypothetical protein | 504.4 | 1372.1 | 2.72 | 0.9884802 |
| METSMITS145B_0230 | KH domain | 244.8 | 95.3 | −2.57 | 0.9884130 |
| METSMITS145B_0564 | Cytidylyltransferase | 48.4 | 21.3 | −2.27 | 0.9882508 |
| METSMITS145B_1517 | Ammonium Transporter Family | 1021.8 | 93.0 | −10.98 | 0.9879685 |
| METSMITS145B_0221 | Ammonium Transporter Family | 1021.8 | 93.0 | −10.98 | 0.9879685 |
| METSMITS145B_1029 | Sodium: neurotransmitter symporter family | 94.0 | 31.1 | −3.03 | 0.9878348 |
| METSMITS145B_0804 | DNA polymerase family B | 158.2 | 352.3 | 2.23 | 0.9876538 |
| METSMITS145B_0599 | adhesin-like protein (Cluster 1267) | 191.4 | 90.4 | −2.12 | 0.9874649 |
| METSMITS145B_0890 | Ribosomal protein L14p/L23e | 536.9 | 185.0 | −2.90 | 0.9874616 |
| METSMITS145B_1686 | hypothetical protein | 342.5 | 88.7 | −3.86 | 0.9873751 |
| METSMITS145B_1039 | Methyltransferase domain | 288.9 | 130.6 | −2.21 | 0.9873505 |
| METSMITS145B_0143 | MatE | 71.6 | 23.9 | −3.00 | 0.9869973 |
| METSMITS145B_0874 | Integral membrane protein DUF106 | 330.0 | 113.0 | −2.92 | 0.9869525 |
| METSMITS145B_1547 | Peptidase family M48 | 75.1 | 162.2 | 2.16 | 0.9866127 |
| METSMITS145B_0036 | 3-dehydroquinate synthase (EC 4.6.1.3) | 400.8 | 199.6 | −2.01 | 0.9865625 |
| METSMITS145B_0367 | Protein of unknown function (DUF509) | 221.5 | 100.5 | −2.20 | 0.9865053 |
| METSMITS145B_0878 | Ribosomal protein L15 | 516.5 | 237.4 | −2.18 | 0.9864541 |
| METSMITS145B_0600 | Protein of unknown function DUF70 | 109.3 | 31.0 | −3.53 | 0.9864365 |
| METSMITS145B_1537 | Peptidase family M48 | 65.8 | 140.4 | 2.13 | 0.9862686 |
| METSMITS145B_0536 | hypothetical protein | 691.9 | 316.8 | −2.18 | 0.9862085 |
| METSMITS145B_0196 | Histone-like transcription factor (CBF/ | 116600.0 | 233350.9 | 2.00 | 0.9860558 |
| METSMITS145B_1804 | hypothetical protein | 6.5 | 14.7 | 2.26 | 0.9858840 |
| METSMITS145B_0838 | Cupin domain | 989.7 | 2032.4 | 2.05 | 0.9858283 |
| METSMITS145B_0707 | hypothetical protein | 54.4 | 19.0 | −2.86 | 0.9848908 |
| METSMITS145B_1834 | hypothetical protein | 378.5 | 124.5 | −3.04 | 0.9847138 |
| METSMITS145B_1666 | hypothetical protein | 69.3 | 27.5 | −2.52 | 0.9838153 |
| METSMITS145B_0827 | hypothetical protein | 265.7 | 111.7 | −2.38 | 0.9837558 |
| METSMITS145B_0994 | hypothetical protein | 296.2 | 121.7 | −2.43 | 0.9836185 |
| METSMITS145B_0826 | hypothetical protein | 76.9 | 23.6 | −3.26 | 0.9830315 |
| METSMITS145B_0538 | B12 binding domain | 362.5 | 1019.1 | 2.81 | 0.9828607 |
| METSMITS145B_0357 | hypothetical protein | 111.7 | 245.7 | 2.20 | 0.9821259 |
| METSMITS145B_1424 | Phosphoribosyl-ATP | 447.5 | 208.0 | −2.15 | 0.9820992 |
| | pyrophosphohydrolase | | | | |
| METSMITS145B_1281 | Shikimate/quinate 5-dehydrogenase | 126.8 | 58.6 | −2.16 | 0.9820247 |
| METSMITS145B_0632 | yrdC domain | 106.0 | 44.9 | −2.36 | 0.9811305 |
| METSMITS145B_0899 | Ribosomal protein L23 | 524.8 | 190.1 | −2.76 | 0.9809105 |
| METSMITS145B_0396 | hypothetical protein | 4585.6 | 332.4 | −13.80 | 0.9804666 |
| METSMITS145B_0105 | hypothetical protein | 155.8 | 29.4 | −5.30 | 0.9802722 |
| METSMITS145B_1663 | ABC transporter | 75.6 | 163.2 | 2.16 | 0.9788921 |
| METSMITS145B_0963 | hypothetical protein | 68.3 | 230.8 | 3.38 | 0.9781729 |
| METSMITS145B_1346 | Sodium/calcium exchanger protein | 148.2 | 66.5 | −2.23 | 0.9779362 |
| METSMITS145B_0300 | hypothetical protein | 90.9 | 30.7 | −2.96 | 0.9775189 |
| METSMITS145B_1030 | Sodium: neurotransmitter symporter family | 156.3 | 68.8 | −2.27 | 0.9774789 |
| METSMITS145B_1824 | 4Fe—4S iron sulfur cluster binding proteins | 141.7 | 55.0 | −2.58 | 0.9772790 |
| METSMITS145B_0464 | hypothetical protein | 255.8 | 565.0 | 2.21 | 0.9770922 |
| METSMITS145B_1670 | hypothetical protein | 26.1 | 11.1 | −2.34 | 0.9768899 |
| METSMITS145B_0434 | hypothetical protein | 24.5 | 62.1 | 2.54 | 0.9766617 |
| METSMITS145B_0276 | hypothetical protein | 158.0 | 672.7 | 4.26 | 0.9765445 |
| METSMITS145B_0381 | NikR C terminal nickel binding domain | 2712.3 | 1008.3 | −2.69 | 0.9760396 |
| METSMITS145B_0292 | hypothetical protein | 147.9 | 465.8 | 3.15 | 0.9759447 |
| METSMITS145B_0064 | hypothetical protein | 976.2 | 486.1 | −2.01 | 0.9759221 |
| METSMITS145B_1577 | MatE | 53.0 | 26.2 | −2.02 | 0.9738624 |
| METSMITS145B_0248 | hypothetical protein | 126.4 | 41.7 | −3.03 | 0.9730076 |
| METSMITS145B_0450 | hypothetical protein | 137.1 | 51.2 | −2.68 | 0.9726703 |
| METSMITS145B_0700 | Protein of unknown function DUF101 | 56.9 | 161.7 | 2.84 | 0.9724525 |
| METSMITS145B_0305 | hypothetical protein | 52.7 | 26.2 | −2.01 | 0.9721916 |
| METSMITS145B_0765 | Uncharacterized protein conserved in | 303.7 | 640.0 | 2.11 | 0.9714954 |
| | archaea | | | | |
| METSMITS145B_0662 | ACT domain | 150.3 | 45.5 | −3.30 | 0.9704155 |
| METSMITS96A_1127 | Uncharacterized protein conserved in | 459.6 | 176.9 | −2.60 | 1.0000 |
| | archaea | | | | |
| METSMITS96A_0937 | Elongation factor Tu GTP binding domain | 439.8 | 988.1 | 2.25 | 1.0000 |
| METSMITS96A_1571 | CoA binding domain | 167.2 | 844.3 | 5.05 | 0.9999 |
| METSMITS96A_0605 | 4Fe—4S binding domain | 50.1 | 287.7 | 5.75 | 0.9999 |
| METSMITS96A_0778 | Ribosomal protein L3 | 331.4 | 736.7 | 2.22 | 0.9998 |
| METSMITS96A_0026 | Acetyltransferase (GNAT) family | 2152.7 | 954.9 | −2.25 | 0.9998 |
| METSMITS96A_0075 | adhesin-like protein (Cluster 18) | 150.1 | 72.3 | −2.08 | 0.9998 |
| METSMITS96A_1071 | AsnC family | 1146.2 | 443.9 | −2.58 | 0.9998 |
| METSMITS96A_0603 | Pyruvate flavodoxin/ferredoxin oxidor | 45.1 | 251.4 | 5.57 | 0.9997 |
| METSMITS96A_1455 | adhesin-like protein (Cluster 37) | 84.5 | 30.0 | −2.82 | 0.9996 |
| METSMITS96A_0777 | Ribosomal protein L4/L1 family | 155.9 | 464.0 | 2.98 | 0.9996 |
| METSMITS96A_0593 | hypothetical protein | 974.4 | 479.5 | −2.03 | 0.9993 |
| METSMITS96A_1126 | Major intrinsic protein | 281.8 | 107.5 | −2.62 | 0.9993 |
| METSMITS96A_0604 | Thiamine pyrophosphate enzyme, C- | 53.6 | 335.9 | 6.26 | 0.9993 |
| | termina | | | | |
| METSMITS96A_0948 | RNA polymerase Rpb1, domain 2 | 128.9 | 258.2 | 2.00 | 0.9993 |
| METSMITS96A_0403 | Helix-turn-helix | 1264.1 | 597.2 | −2.12 | 0.9989 |
| METSMITS96A_0626 | Peptide methionine sulfoxide reductase | 523.4 | 230.3 | −2.27 | 0.9987 |
| METSMITS96A_1014 | hypothetical protein | 4182.6 | 1728.2 | −2.42 | 0.9986 |
| METSMITS96A_1260 | hypothetical protein | 125.6 | 46.8 | −2.68 | 0.9985 |
| METSMITS96A_0601 | Pyruvate ferredoxin/flavodoxin | 336.6 | 1075.0 | 3.19 | 0.9984 |
| | oxidoreductas | | | | |
| METSMITS96A_1456 | Chlamydia polymorphic membrane protein | 243.5 | 118.7 | −2.05 | 0.9984 |
| | (Chl | | | | |
| METSMITS96A_0239 | TCP-1/cpn60 chaperonin family | 207.4 | 422.6 | 2.04 | 0.9983 |
| METSMITS96A_0947 | RNA polymerase Rpb1, domain 5 | 656.1 | 1373.2 | 2.09 | 0.9982 |
| METSMITS96A_0913 | Glutamate/Leucine/Phenylalanine/Valin | 347.6 | 782.8 | 2.25 | 0.9980 |
| METSMITS96A_0926 | Glutamate/Leucine/Phenylalanine/Valin | 347.6 | 782.8 | 2.25 | 0.9980 |
| METSMITS96A_1542 | Sugar-specific transcriptional regulator Trm | 228.7 | 53.0 | −4.31 | 0.9977 |
| METSMITS96A_0732 | hypothetical protein | 1541.1 | 634.2 | −2.43 | 0.9975 |
| METSMITS96A_1524 | S4 domain | 326.0 | 659.6 | 2.02 | 0.9974 |
| METSMITS96A_1119 | adhesin-like protein (Cluster 226) | 673.8 | 179.8 | −3.75 | 0.9973 |
| METSMITS96A_0349 | Ribosomal L15 | 1139.3 | 2798.6 | 2.46 | 0.9969 |
| METSMITS96A_1374 | Chlamydia polymorphic membrane protein | 149.9 | 73.9 | −2.03 | 0.9961 |
| | (Chl | | | | |
| METSMITS96A_0373 | Predicted membrane protein (DUF2107) | 734.6 | 341.7 | −2.15 | 0.9957 |
| METSMITS96A_1733 | Uncharacterized conserved protein | 2328.9 | 742.3 | −3.14 | 0.9955 |
| | (DUF2304) | | | | |
| METSMITS96A_1793 | hypothetical protein | 1206.1 | 594.3 | −2.03 | 0.9954 |
| METSMITS96A_1758 | hypothetical protein | 1312.0 | 595.6 | −2.20 | 0.9954 |
| METSMITS96A_1532 | Enolase, C-terminal TIM barrel domain | 47.7 | 95.7 | 2.01 | 0.9952 |
| METSMITS96A_1849 | hypothetical protein | 269.7 | 126.4 | −2.13 | 0.9951 |
| METSMITS96A_1403 | 4Fe—4S binding domain | 2597.7 | 5467.9 | 2.10 | 0.9950 |
| METSMITS96A_0945 | KH domain | 790.6 | 1791.8 | 2.27 | 0.9950 |
| METSMITS96A_0935 | Ribosomal protein S10p/S20e | 302.4 | 868.1 | 2.87 | 0.9937 |
| METSMITS96A_1519 | Transposase DDE domain | 49.5 | 21.1 | −2.34 | 0.9934 |
| METSMITS96A_0833 | hypothetical protein | 394.4 | 133.6 | −2.95 | 0.9929 |
| METSMITS96A_0720 | hypothetical protein | 434.5 | 161.3 | −2.69 | 0.9926 |
| METSMITS96A_0087 | hypothetical protein | 43.7 | 19.0 | −2.31 | 0.9917 |
| METSMITS96A_0304 | Uncharacterised protein family UPF0047 | 388.8 | 95.0 | −4.09 | 0.9911 |
| METSMITS96A_0859 | Chlamydia polymorphic membrane protein | 209.8 | 98.3 | −2.13 | 0.9910 |
| | (Chl | | | | |
| METSMITS96A_0973 | hypothetical protein | 91.0 | 36.1 | −2.52 | 0.9900 |
| METSMITS96A_0974 | hypothetical protein | 661.1 | 284.5 | −2.32 | 0.9895 |
| METSMITS96A_0347 | Archaeal ATPase | 141.9 | 68.1 | −2.08 | 0.9893 |
| METSMITS96A_0272 | hypothetical protein | 439.7 | 216.2 | −2.03 | 0.9893 |
| METSMITS96A_0005 | hypothetical protein | 171.4 | 76.9 | −2.23 | 0.9884 |
| METSMITS96A_0664 | Ribosomal protein L11, N-terminal dom | 1444.2 | 3049.9 | 2.11 | 0.9877 |
| METSMITS96A_1347 | hypothetical protein | 496.1 | 171.7 | −2.89 | 0.9873 |
| METSMITS96A_0501 | Helix-turn-helix | 683.8 | 270.7 | −2.53 | 0.9867 |
| METSMITS96A_0919 | E1-E2 ATPase | 171.4 | 82.3 | −2.08 | 0.9862 |
| METSMITS96A_1650 | Glycosyl transferase family 2 | 105.8 | 46.5 | −2.28 | 0.9861 |
| METSMITS96A_0602 | 4Fe—4S binding domain | 57.2 | 250.6 | 4.38 | 0.9859 |
| METSMITS96A_1529 | Ribosomal protein S9/S16 | 316.2 | 679.4 | 2.15 | 0.9852 |
| METSMITS96A_0050 | hypothetical protein | 576.9 | 280.1 | −2.06 | 0.9846 |
| METSMITS96A_1591 | hypothetical protein | 59.5 | 169.9 | 2.86 | 0.9832 |
| METSMITS96A_0093 | hypothetical protein | 349.3 | 168.8 | −2.07 | 0.9826 |
| METSMITS96A_0019 | Exonuclease VII small subunit | 68.7 | 24.2 | −2.84 | 0.9824 |
| METSMITS96A_1783 | Transcription factor S-II (TFIIS) | 633.2 | 302.7 | −2.09 | 0.9820 |
| METSMITS96A_0189 | hypothetical protein | 149.7 | 73.4 | −2.04 | 0.9816 |
| METSMITS96A_1107 | Domain related to MnhB subunit of Na+/H+ | 21.7 | 51.5 | 2.37 | 0.9810 |
| | ant | | | | |
| METSMITS96A_0885 | HxlR-like helix-turn-helix | 332.2 | 126.0 | −2.64 | 0.9809 |
| METSMITS96A_1237 | 6-O-methylguanine DNA methyltransferase | 221.2 | 99.0 | −2.23 | 0.9805 |
| METSMITS96A_0253 | hypothetical protein | 412.8 | 126.2 | −3.27 | 0.9799 |
| METSMITS96A_1566 | Histidine kinase-, DNA gyrase B-, and | 75.0 | 34.0 | −2.21 | 0.9781 |
| | HSP90 | | | | |
| METSMITS96A_0852 | GHMP kinases N terminal domain | 45.2 | 91.8 | 2.03 | 0.9775 |
| METSMITS96A_0746 | RNAse P Rpr2/Rpp21/SNM1 subunit | 707.8 | 1480.0 | 2.09 | 0.9769 |
| | domain | | | | |
| METSMITS96A_1611 | hypothetical protein | 57.6 | 25.1 | −2.30 | 0.9765 |
| METSMITS96A_1628 | hypothetical protein | 44.4 | 21.8 | −2.04 | 0.9764 |
| METSMITS96A_1064 | Domain of unknown function (DUF1922) | 4893.8 | 2191.7 | −2.23 | 0.9764 |
| METSMITS96A_0765 | Ribosomal family S4e | 101.0 | 214.3 | 2.12 | 0.9750 |
| METSMITS96A_0116 | NADP oxidoreductase coenzyme F420- | 38.1 | 17.3 | −2.20 | 0.9744 |
| | depe | | | | |
| METSMITS96A_1102 | hypothetical protein | 25.6 | 57.4 | 2.25 | 0.9735 |
| METSMITS96A_1559 | Coenzyme F420 | 37.4 | 16.6 | −2.26 | 0.9733 |
| | hydrogenase/dehydrogenase, | | | | |
| METSMITS96A_1822 | YLP motif | 34.3 | 69.0 | 2.01 | 0.9715 |
| METSMITS96A_0301 | hypothetical protein | 844.2 | 361.9 | −2.33 | 0.9714 |
| METSMITS96A_0061 | hypothetical protein | 2255.9 | 803.8 | −2.81 | 0.9709 |

Genes significantly regulated by formate were identified for each strain by analyzing normalized reads by CyberT, whch calculates a posterior probability of differential expression (PPDE) statistic to determine significance (PPDE ≧ 0.97 and at least a twofold difference between coditions).

### Example 11

### Horizontal Gene Transfer (HG)

[0223] To better understand genomic differences among M. smithii strains, HGT was detected by using both compositional and phylogenetic methods. Compositional HGT detection was performed by examining the typicality of dinucleotides, codons, and k-words of lengths 4 and 6. Because highly expressed genes are known to contain unusual compositions, genes were scored for typicality against both a whole-genome compositional model and a model built using ribosomal proteins (55, 56). Only genes found to be below the significance threshold when compared against both models were annotated as transferred. To select significance thresholds for transfer, genes in each genome were ordered from most to least atypical. As reported (57), gene typicality was observed to increase rapidly for the most extreme genes, and then to rise only gradually for the rest of the genome (FIG. 25A). In this case, thresholds were set at the point where the change among the overlapping 30 gene windows was <0.1% of the score of the previous window.

[0224] Among the compositional measures analyzed, the proportion of genes defined as horizontally transferred ranged from 3.3 to 10.1% in the dataset as a whole. However, because the absolute number of horizontally transferred genes predicted can depend on the compositional measure chosen, the stringency of the thresholds selected, the amount of time that has passed since the transfer occurred, and the compositional distinctiveness of gene transfer donors (ref. 58; reviewed in ref. 56), this analysis did not focus on the absolute magnitude of gene transfer in these lineages. Instead, differences in the frequency of HGT events for different classes of genes were of primary interest, in addition to how this process has contributed to the evolution and specialization of the characterized M. smithii strains.

[0225] When using compositional methods, it was observed that gene transfer is more frequent in the variable genome than the core. For example, when examining 3-1 dinucleotide use (55) and using the rank order of G scores as the significance threshold, 5.7% of the core genes in the pan-genome show compositional evidence of transfer, compared with fully 16.4% of the variably represented genes, suggesting an approximately threefold enrichment of gene transfer in the variable relative to the core components of the pan-genome.

[0226] However, others have observed that phylogenetic methods tend to detect more ancient transfer events than compositional methods (59). Consistent with these observations, 73% of the genes for which PhyloNet found evidence of HGT were part of M. smithii's core genome, indicating transfer before the divergence of strains. By contrast, most putative HGT events predicted by compositional methods were part of the variable genome (59.3-68.0% of transfers, depending on the method) (Tables 20 and 21). This difference may be due in part to the requirement of phylogenetic methods for orthologs of the gene under investigation: Compositional HGT predictions for the subset of genes that could be mapped to KEGG orthology groups were also biased toward the core genome. Genes with both compositional and phylogenetic evidence of transfer tend to be more evenly split between the core and variable genomes than transfers supported by either type of evidence alone (Tables 20 and 21).

[0227] Taken together, these findings suggest that gene transfer has shaped both the core genome of M. smithii and differences between strains. External evidence further supports a role for HGT in shaping the core genome of M. smithii: 89.1% of genes within prophage (as detected by PhageFinder) are part of the core genome (Tables 20 and 21).

### Functional Contribution of Horizontally Transferred Genes.

[0228] To test for differences in the functions contributed to the M. smithii pan-genome by the core genome, variable genome, or horizontally transferred genes, each of these three gene sets were annotated to KEGG pathways (level 2). The M. smithii core genome is enriched in genes involved in “translation” while being depleted in “membrane transporters” and “unclassified metabolic” genes (Bonferroni-corrected G-test for significance; P<0.001). The variable genome is enriched in genes for membrane transporters, “glycan biosynthesis and metabolism,” and genes whose functions are poorly characterized, while being depleted for genes involved in translation (Bonferroni-corrected G-test; P<0.001). Horizontally transferred genes, regardless of the detection method used, are most divergent from the pan-genome in their functional profile than either the core or variable components of the M. smithii pan-genome. This finding suggests that gene transfer has contributed significant functional diversity to M. smithii.

[0229] To understand in more detail the specific categories of genes that have been most frequently transferred, significant HGT results for 3-1 dinucleotide use were pooled across genomes and categorized according to KEGG pathway and KEGG orthology group, weighting genes with multiple pathway annotations on a per gene (rather than per annotation) basis (Table 32). As previously observed for genomic islands (60), genes of unknown or poorly characterized function dominated the HGT pool. Among genes with known KEGG level 2 pathway annotations, those in the KEGG category for folate biosynthesis were the most frequently transferred (101.7 normalized annotations). Tetrahydromethanopterin (THMP) methyltransferase genes were the most frequently transferred KEGG orthology (KO) within this group (23 putative HGT events for the D subunit). THMP methylransferase (61) participates in both the methanogenesis and folate biosynthesis pathways by transferring a methyl group from 5-Methyl-THMP to coenzyme-M (FIG. 24). Genes involved in coenzyme-M recycling during methanogenesis were similarly frequently transferred, including methyl-coenzyme M reductase α subunit (EC 2.8.4.1; 23 annotations), and heterodisulfide reductase subunit a (EC 1.8.98.1; 22 annotations). Other frequently exchanged KEGG pathway functions included PST-family polysaccharide transporters (50.5/52.5 normalized annotations were compositionally atypical, representing a 5.3-fold enrichment in the putative HGT pool).

[0230] Phylogenetic analysis of HGT revealed similar trends. Genes involved in the KEGG folate biosynthesis pathway are the second most frequently transferred functional class (after unclassified metabolic genes). Methanogenesis genes are also among the most abundant transferred functional classes (rank order 22/173 classes). As in the analysis of genes with atypical dinucleotide compositions, phylogenetic HGT detection found transfer in KO groups involved in methyl-coenzyme M recycling, including those for THMP methyltransferase A, B, and C subunits (EC 2.1.1.86), methyl-coenzyme M reductase system component A2, and heterodisulfide reductase (B and D subunits) (EC 1.8.98.1).

[0231] In addition to characterizing KEGG functional categories, ALP gene transfer were analyzed given their proposed importance in M. smithii niche specialization. Because the vast majority of ALP genes could not be assigned to KEGG orthology groups, only a small subset could be tested for gene transfer by using phylogenetic methods. Of the ALPs that could be assigned to KO groups, 6/49 (12.2%) were classified as being horizontally transferred using phylogenetic techniques. When analyzed compositionally, 5 or 6 of 6 of these ALPs were compositionally atypical in dinucleotide use, codon use, and k-words of length 4 or 6.

[0232] Remarkably, it was found that in the full pool of 854 ALP OGUs, between 52% and 65% show evidence of transfer across a variety of compositional measures, an enrichment of 6.4- to 9.3-fold when normalized to the overall levels of gene transfer predicted by the same methods. ALPs that could be mapped to KO groups were less compositionally atypical than ALPs as a whole (only 30.6-36.7% were compositionally annotated as transferred for this subgroup). Despite the observation that these genes are highly expressed in M. smithii strains, the ALPs annotated as possessing compositional evidence of transfer do not match the model for ribosomal proteins in their genome, meaning that their expression level alone does not account for their compositional atypicality. Large-scale HGT of ALPs would be consistent with their variability among strains.

TABLE 32
KEGG categories of genes with evidence of horizontal gene transfer

| | Compositionally | | All genes in | | |
|---|---|---|---|---|---|
| | Atypical Genes | | pan-genome | | Fold |
| KEGG Pathway | in pathway* | Percent | in pathway | Percent | Enrichment |
| Unclassified; Poorly | 215 | 12.1 | 3067 | 13.0 | 0.93 |
| Characterized | | | | | |
| Metabolism; Metabolism of | 201 | 11.3 | 2395 | 10.1 | 1.12 |
| Cofactors and Vitamins | | | | | |
| Unclassified; Cellular Processes | 197 | 11.1 | 1031 | 4.4 | 2.54 |
| and Signaling | | | | | |
| Genetic Information Processing; | 187 | 10.5 | 1259 | 5.3 | 1.97 |
| Replication and Repair | | | | | |
| Unclassified; Genetic Information | 143 | 8.0 | 1918 | 8.1 | 0.99 |
| Processing | | | | | |
| Environmental Information | 133 | 7.5 | 1268 | 5.4 | 1.39 |
| Processing; Membrane Transport | | | | | |
| Unclassified; Metabolism | 125 | 7.0 | 1881 | 8.0 | 0.88 |
| Metabolism; Carbohydrate | 75 | 4.2 | 1371 | 5.8 | 0.73 |
| Metabolism | | | | | |
| Metabolism; Nucleotide Metabolism | 70 | 3.9 | 1237 | 5.2 | 0.75 |
| Metabolism; Glycan Biosynthesis | 62 | 3.5 | 298 | 1.3 | 2.74 |
| and Metabolism | | | | | |
| Metabolism; Enzyme Families | 60 | 3.4 | 402 | 1.7 | 1.97 |
| Metabolism; Amino Acid | 58 | 3.3 | 1981 | 8.4 | 0.39 |
| Metabolism | | | | | |
| Metabolism; Energy Metabolism | 57 | 3.2 | 963 | 4.1 | 0.78 |
| Environmental Information | 52 | 2.9 | 78 | 0.3 | 8.89 |
| Processing; Signaling Molecules | | | | | |
| and Interaction | | | | | |
| Genetic Information Processing; | 24 | 1.4 | 384 | 1.6 | 0.84 |
| Folding, Sorting and Degradation | | | | | |
| Metabolism; Xenobiotics | 21 | 1.2 | 516 | 2.2 | 0.53 |
| Biodegradation and Metabolism | | | | | |
| Metabolism; Metabolism of Other | 17 | 1.0 | 269 | 1.1 | 0.85 |
| Amino Acids | | | | | |
| Cellular Processes; Cell Motility | 15 | 0.8 | 57 | 0.2 | 3.50 |
| Human Diseases; Infectious | 11 | 0.6 | 69 | 0.3 | 2.09 |
| Diseases | | | | | |
| Environmental Information | 10 | 0.6 | 119 | 0.5 | 1.12 |
| Processing; Signal Transduction | | | | | |
| Genetic Information Processing; | 9 | 0.5 | 2010 | 8.5 | 0.06 |
| Translation | | | | | |
| Cellular Processes; Transport and | 8 | 0.4 | 34 | 0.1 | 3.09 |
| Catabolism | | | | | |
| Genetic Information Processing; | 8 | 0.4 | 382 | 1.6 | 0.28 |
| Transcription | | | | | |
| Organismal Systems; Immune | 7 | 0.4 | 23 | 0.1 | 4.38 |
| System | | | | | |
| Human Diseases; | 7 | 0.4 | 53 | 0.2 | 1.69 |
| Neurodegenerative Diseases | | | | | |
| Organismal Systems; Excretory | 3 | 0.2 | 21 | 0.1 | 1.77 |
| System | | | | | |
| Metabolism; Biosynthesis of | 2 | 0.1 | 292 | 1.2 | 0.08 |
| Polyketides and Terpenoids | | | | | |
| Organismal Systems; | 1 | 0.1 | 6 | 0.0 | 2.80 |
| Environmental Adaptation | | | | | |
| Organismal Systems; Circulatory | 1 | 0.1 | 3 | 0.0 | 4.80 |
| System | | | | | |
| Metabolism; Lipid Metabolism | 1 | 0.1 | 246 | 1.0 | 0.05 |
| Metabolism; Biosynthesis of Other | 0 | 0.0 | 135 | 0.6 | 0.02 |
| Secondary Metabolites | | | | | |

*Genes shown are atypical in 3-1 dinucleotide usage

TABLE 33
Number of ALPs per M. smithii strain

| | M. smithii strains | Number of ALPs |
|---|---|---|
| MZ twin 1 | METSMITS94A | 52 |
| | METSMITS94B | 57 |
| | METSMITS94C | 52 |
| MZ twin 2 | METSMITS95A | 71 |
| | METSMITS95B | 58 |
| | METSMITS95C | 54 |
| | METSMITS95D | 61 |
| Mother of MZ twins | METSMITS96A | 56 |
| | METSMITS96B | 50 |
| | METSMITS96C | 43 |
| DZ twin 1 | METSMITS145A | 47 |
| | METSMITS145B | 48 |
| DZ twin 2 | METSMITS146A | 44 |
| | METSMITS146B | 41 |
| | METSMITS146C | 89 |
| | METSMITS146D | 43 |
| | METSMITS146E | 52 |
| Mother of DZ twins | METSMITS147A | 51 |
| | METSMITS147B | 53 |
| | METSMITS147C | 53 |
| Culture Collection | METSMIALI (DSM2375) | 31 |
| (previously sequenced) | METSMIF1 (DSM2374) | 34 |
| | MsmPS (NC_009515) | 50 |

### Example 12

### Prospectus

[0233] These results lead us to hypothesize that M. smithii strains use their different repertoires of ALPs and the different sensitivities of ALP genes to formate to create diversity in their physical locations and/or their metabolic niches within the gut. Stated another way, these variations in expressed ALP repertoires could have important effects on the ability of different strains to establish syntrophic relationships with bacterial partners that have different abilities to generate formate or other substrates, or that have differing patterns of co-occurrence within an individual over time and between individuals. To further explore this notion, it will be important to define the structures of representative members of different ALP clusters through an M. smithii-directed structural genomics effort: Selection of ALPs could be guided by a number of criteria, including their strain distribution and their patterns of expression, both in vitro in monoculture in the presence of a variety of potential substrates for their metabolic networks, and in vivo in gnotobiotic mice containing various collections of sequenced M. smithii isolates and available cultured co-occurring bacterial taxa. The interactions between isolates and co-occurring bacterial species can also be explored in vitro if cocolonization of gnotobiotic mice proves to be problematic either because of difficulty in identifying suitable host diets or strains that are fit in the mouse gut (e.g., we have not yet been able to achieve persistent colonization of gnotobiotic mice with any of the five strains characterized in vitro by RNA-Seq after inoculating all of them together with a consortium of human gut-derived members of the Firmicutes, Bacteroidetes, and Proteobacteria that include saccharolytic bacteria and hydrogen producers and consumers). A complementary approach will be to select taxa for these in vitro and in vivo studies by predicting potential syntrophic relationships through in silico metabolic reconstructions of the metabolic networks of sequenced co-occurring species and M. smithii isolates, using methods described by Borenstein et al. (47).

### References for Examples 6-12

[0234] 1. Costello E K, et al. Bacterial community variation in human body habitats across space and time. Science. 2009; 326:1694-1697.
[0235] 2. Turnbaugh P J, et al. A core gut microbiome in obese and lean twins. Nature. 2009; 457:480-484.
[0236] 3. Eckburg P B, et al. Diversity of the human intestinal microbial flora. Science. 2005; 308:1635-1638.
[0237] 4. Dethlefsen L, Huse S, Sogin M L, Relman D A. The pervasive effects of an antibiotic on the human gut microbiota, as revealed by deep 16S rRNA sequencing. PLoS Biol. 2008; 6:e280.
[0238] 5. Qin J, et al. MetaHIT Consortium A human gut microbial gene catalogue established by metagenomic sequencing. Nature. 2010; 464:59-65.
[0239] 6. Reyes A, et al. Viruses in the faecal microbiota of monozygotic twins and their mothers. Nature. 2010; 466:334-338.
[0240] 7. Wolin M J, Miller T L. Interactions of microbial populations in cellulose fermentation. Fed Proc. 1983; 42:109-113.
[0241] 8. McNeil N I. The contribution of the large intestine to energy supplies in man. Am J Clin Nutr. 1984; 39:338-342.
[0242] 9. Scanlan P D, Shanahan F, Marchesi J R. Culture-independent analysis of desulfovibrios in the human distal colon of healthy, colorectal cancer and polypectomized individuals. FEMS Microbiol Ecol. 2009; 69:213-221.
[0243] 10. Bond J H, Jr, Engel R R, Levitt M D. Factors influencing pulmonary methane excretion in man. An indirect method of studying the in situ metabolism of the methane-producing colonic bacteria. J Exp Med. 1971; 133:572-588.
[0244] 11. Levitt M D, Fume J K, Kuskowski M, Ruddy J. Stability of human methanogenic flora over 35 years and a review of insights obtained from breath methane measurements. Clin Gastroenterol Hepatol. 2006; 4:123-129.
[0245] 12. Scanlan P D, Shanahan F, Marchesi J R. Human methanogen diversity and incidence in healthy and diseased colonic groups using mcrA gene analysis. BMC Microbiol. 2008; 8:79.
[0246] 13. Attaluri A, Jackson M, Valestin J, Rao S S C. Methanogenic flora is associated with altered colonic transit but not stool characteristics in constipation without IBS. Am J Gastroenterol. 2010; 105:1407-1411.
[0247] 14. Pimentel M, et al. Methane, a gas produced by enteric bacteria, slows intestinal transit and augments small intestinal contractile activity. Am J Physiol Gastrointest Liver Physiol. 2006; 290:G1089-G1095.
[0248] 15. Armougom F, Henry M, Vialettes B, Raccah D, Raoult D. Monitoring bacterial community of human gut microbiota reveals an increase in Lactobacillus in obese patients and methanogens in anorexic patients. PLoS ONE. 2009; 4:e7125.
[0249] 16. Zhang H, et al. Human gut microbiota in obesity and after gastric bypass. Proc Natl Acad Sci USA. 2009; 106:2365-2370.
[0250] 17. Florin T H, Zhu G, Kirk K M, Martin N G. Shared and unique environmental factors determine the ecology of methanogens in humans and rats. Am J Gastroenterol. 2000; 95:2872-2879.
[0251] 18. Pitt P, de Bruijn K M, Beeching M F, Goldberg E, Blendis L M. Studies on breath methane: The effect of ethnic origins and lactulose. Gut. 1980; 21:951-954.
[0252] 19. Fricke W F, et al. The genome sequence of Methanosphaera stadtmanae reveals why this human intestinal archaeon is restricted to methanol and H2 for methane formation and ATP synthesis. J Bacteriol. 2006; 188:642-658.
[0253] 20. Hackstein J H P, Van Alen T A, Op Den Camp H, Smits A, Mariman E. Intestinal methanogenesis in primates—a genetic and evolutionary approach. Dtsch Tierarztl Wochenschr. 1995; 102:152-154.
[0254] 21. Hackstein J H P, et al. Fecal methanogens and vertebrate evolution. Evolution. 1996; 50:559-572.
[0255] 22. Scholten J C, Culley D E, Brockman F J, Wu G, Zhang W. Evolution of the syntrophic interaction between Desulfovibrio vulgaris and Methanosarcina barkeri: Involvement of an ancient horizontal gene transfer. Biochem Biophys Res Commun. 2007; 352:48-54.
[0256] 23. Plugge C M, et al. Global transcriptomics analysis of the Desulfovibrio vulgaris change from syntrophic growth with Methanosarcina barkeri to sulfidogenic metabolism. Microbiology. 2010; 156:2746-2756.
[0257] 24. Friedrich M W. Phylogenetic analysis reveals multiple lateral transfers of adenosine-5′-phosphosulfate reductase genes among sulfate-reducing microorganisms. J Bacteriol. 2002; 184:278-289.
[0258] 25. Stewart J A, Chadwick V S, Murray A. Carriage, quantification, and predominance of methanogens and sulfate-reducing bacteria in faecal samples. Lett Appl Microbiol. 2006; 43:58-63.
[0259] 26. Quince C, et al. Accurate determination of microbial diversity from 454 pyrosequencing data. Nat Methods. 2009; 6:639-641.
[0260] 27. Caporaso J G, et al. QIIME allows analysis of high-throughput community sequencing data. Nat Methods. 2010; 7:335-336.
[0261] 28. Edgar R C. Search and clustering orders of magnitude faster than BLAST. Bioinformatics. 2010; 26:2460-2461.
[0262] 29. DeSantis T Z, et al. Greengenes, a chimera-checked 16S rRNA gene database and workbench compatible with ARB. Appl Environ Microbiol. 2006; 72:5069-5072.
[0263] 30. Ludwig W, et al. ARB: a software environment for sequence data. Nucleic Acids Res. 2004; 32:1363-1371.
[0264] 31. Cole J R, et al. The Ribosomal Database Project (RDP-II): Sequences and tools for high-throughput rRNA analysis. Nucleic Acids Res. 2005; 33(Database issue):D294-D296.
[0265] 32. Mackie R I, et al. Ecology of uncultivated Oscillospira species in the rumen of cattle, sheep, and reindeer as assessed by microscopy and molecular approaches. Appl Environ Microbiol. 2003; 69:6808-6815.
[0266] 33. Yanagita K, et al. Flow cytometric sorting, phylogenetic analysis and in situ detection of Oscillospira guillermondii, a large, morphologically conspicuous but uncultured ruminal bacterium. Int J Syst Evol Microbiol. 2003; 53:1609-1614.
[0267] 34. Grech-Mora I, et al. Isolation and characterization of Sporobacter termitidis gen nov sp nov, from the digestive tract of the wood-feeding termite Nasutitermes lujae. Int J Syst Bacteriol. 1996; 46:512-518.
[0268] 35. Drake H L, Gössner A S, Daniel S L. Old acetogens, new light. Ann N Y Acad. Sci. 2008; 1125:100-128.
[0269] 36. Levitt M D. Volume and composition of human intestinal gas determined by means of an intestinal washout technic. N Engl J Med. 1971; 284:1394-1398.
[0270] 37. Li Y F, et al. Molecular characterization and hydrogen production of a new species of anaerobe. Environ Sci Health A Tox Hazard Subst Environ Eng. 2005; 40:1929-1938.
[0271] 38. Ouwerkerk D, Klieve A V, Forster R J, Templeton J M, Maguire A J. Characterization of culturable anaerobic bacteria from the forestomach of an eastern grey kangaroo, Macropus giganteus. Lett Appl Microbiol. 2005; 41:327-333.
[0272] 39. Kosaka T, et al. The genome of Pelotomaculum thermopropionicum reveals niche-associated evolution in anaerobic microbiota. Genome Res. 2008; 18:442-448.
[0273] 40. McInerney M J, et al. The genome of Syntrophus aciditrophicus: Life at the thermodynamic limit of microbial growth. Proc Natl Acad Sci USA. 2007; 104:7600-7605.
[0274] 41. Darling A C, Mau B, Blattner F R, Perna N T. Mauve: Multiple alignment of conserved genomic sequence with rearrangements. Genome Res. 2004; 14:1394-1403.
[0275] 42. Samuel B S, et al. Genomic and metabolic adaptations of Methanobrevibacter smithii to the human gut. Proc Natl Acad Sci USA. 2007; 104:10643-10648.
[0276] 43. Giannakis M, et al. Response of gastric epithelial progenitors to Helicobacter pylori Isolates obtained from Swedish patients with chronic atrophic gastritis. J Biol Chem. 2009; 284:30383-30394.
[0277] 44. Lipinska B, Zylicz M, Georgopoulos C. The HtrA (DegP) protein, essential for Escherichia coli survival at high temperatures, is an endopeptidase. J Bacteriol. 1990; 172:1791-1797.
[0278] 45. Lee I, Berdis A J, Suzuki C K. Recent developments in the mechanistic enzymology of the ATP-dependent Lon protease from Escherichia coli: Highlights from kinetic studies. Mol Biosyst. 2006; 2:477-483.
[0279] 46. Lewis A L, et al. Innovations in host and microbial sialic acid biosynthesis revealed by phylogenomic prediction of nonulosonic acid structure. Proc Natl Acad Sci USA. 2009; 106:13552-13557.
[0280] 47. Borenstein E, Kupiec M, Feldman M W, Ruppin E. Large-scale reconstruction and phylogenetic analysis of metabolic environments. Proc Natl Acad Sci USA. 2008; 105:14482-14487.
[0281] 48. Zerbino D R, Birney E. Velvet: Algorithms for de novo short read assembly using de Bruijn graphs. Genome Res. 2008; 18:821-829.
[0282] 49. Darling A C, Mau B, Blattner F R, Perna N T (2004) Mauve: Multiple alignment of conserved genomic sequence with rearrangements. Genome Res 14:1394-1403.
[0283] 50. Samuel B S, et al. (2007) Genomic and metabolic adaptations of Methanobrevibacter smithii to the human gut. Proc Natl Acad Sci USA 104:10643-10648.
[0284] 51. Reyes A, et al. (2010) Viruses in the faecal microbiota of monozygotic twins and their mothers. Nature 466:334-338.
[0285] 52. Fouts D E (2006) Phage_Finder: Automated identification and classification of prophage regions in complete bacterial genome sequences. Nucleic Acids Res 34:5839-5851.
[0286] 53. Delcher A L, Phillippy A, Carlton J, Salzberg S L (2002) Fast algorithms for large-scale genome alignment and comparison. Nucleic Acids Res 30:2478-2483.
[0287] 54. Luo Y, Pfister P, Leisinger T, Wasserfallen A (2002) Pseudomurein endoisopeptidases PeiW and PeiP, two moderately related members of a novel family of proteases produced in Methanothermobacter strains. FEMS Microbiol Lett 208:47-51.
[0288] 55. Karlin S, Mrázek J, Campbell A M (1998) Codon usages in different gene classes of the Escherichia coli genome. Mol Microbiol 29:1341-1355.
[0289] 56. Zaneveld J R, Nemergut D R, Knight R (2008) Are all horizontal gene transfers created equal? Prospects for mechanism-based studies of HGT patterns. Microbiology 154:1-15.
[0290] 57. Tsirigos A, Rigoutsos I (2005) A new computational method for the detection of horizontal gene transfer events. Nucleic Acids Res 33:922-933.
[0291] 58. Lawrence J G, Ochman H (1997) Amelioration of bacterial genomes: Rates of change and exchange. J Mol Evol 44:383-397.
[0292] 59. Ragan M A, Harlow T J, Beiko R G (2006) Do different surrogate methods detect lateral genetic transfer events of different relative ages? Trends Microbiol 14:4-8.
[0293] 60. Hsiao W W, et al. (2005) Evidence of a large novel gene pool associated with prokaryotic genomic islands. PLoS Genet 1:e62.
[0294] 61. Sauer F D (1986) Tetrahydromethanopterin methyltransferase, a component of the methane synthesizing complex of Methanobacterium thermoautotrophicum. Biochem Biophys Res Commun 136:542-547.
[0295] 62. Hales B A, et al. (1996) Isolation and identification of methanogen-specific DNA from blanket bog peat by PCR amplification and sequence analysis. Appl Environ Microbiol 62:668-675.
[0296] 63. Eckburg P B, et al. (2005) Diversity of the human intestinal microbial flora. Science 308:1635-1638.
[0297] 64. DeLong E F (1992) Archaea in coastal marine environments. Proc Natl Acad Sci USA 89:5685-5689.
[0298] 65. Turnbaugh P J, et al. (2009) A core gut microbiome in obese and lean twins. Nature 457:480-484.
[0299] 66. Kayar S R, Fahlman A, Lin W C, Whitman W B (2001) Increasing activity of H₂-metabolizing microbes lowers decompression sickness risk in pigs during H₂ dives. J Appl Physiol 91:2713-2719.
[0300] 67. Knight R, et al. (2007) PyCogent: A toolkit for making sense from sequence. Genome Biol 8:R171.
[0301] 68. Than C, Ruths D, Nakhleh L (2008) PhyloNet: A software package for analyzing and reconstructing reticulate evolutionary relationships. BMC Bioinformatics 9:322.
[0302] 69. Edgar R C (2004) MUSCLE: multiple sequence alignment with high accuracy and high throughput. Nucleic Acids Res 32:1792-1797.
[0303] 70. Price M N, Dehal P S, Arkin A P (2010) FastTree 2—approximately maximum-likelihood trees for large alignments. PLoS ONE 5:e9490.
[0304] 71. Rey F E, et al. (2010) Dissecting the in vivo metabolic potential of two human gut acetogens. J Biol Chem 285:22082-22090.
[0305] 72. Ning Z, Cox A J, Mullikin J C (2001) SSAHA: A fast search method for large DNA databases. Genome Res 11:1725-1729.

What is claimed is:

1. An array comprising a substrate, the substrate having disposed thereon at least one nucleic acid, wherein the nucleic acid comprises a nucleic acid sequence selected from the group consisting of SEQ ID NO: 1, 3, 5, 7, 9, 11, 13, 15, 17, 19, 21, 23, 25, 27, 29, 31, 33, 35, 37, 39, 41, 43, 45, 47, 49, 51, 53, 55, 57, 59, 61, 63, 65, 67, 69, 71, 73, 75, 77, 79, 81, 83, 85, 87, 89, 91, 93, and 95.

2. The array of claim 1, wherein the nucleic acid or nucleic acids are located at a spatially defined address of the array.

3. The array of claim 2, wherein the array has no more than 500 spatially defined addresses.

4. The array of claim 2, wherein the array has at least 500 spatially defined addresses.

5. The array of claim 2, wherein the array further comprises at least one nucleic acid selected from the group consisting of SEQ ID NOs: 97-1240.

6. An array comprising a substrate, the substrate having disposed thereon at least one polypeptide, wherein the polypeptide is encoded by a nucleic acid sequence selected from the nucleic acid sequences selected from the group consisting of SEQ ID NO: 1, 3, 5, 7, 9, 11, 13, 15, 17, 19, 21, 23, 25, 27, 29, 31, 33, 35, 37, 39, 41, 43, 45, 47, 49, 51, 53, 55, 57, 59, 61, 63, 65, 67, 69, 71, 73, 75, 77, 79, 81, 83, 85, 87, 89, 91, 93, and 95.

7. The array of claim 5, wherein the polypeptide or polypeptides are located at a spatially defined address of the array.

8. The array of claim 6, wherein the array has no more than 500 spatially defined addresses.

9. The array of claim 6, wherein the array has at least 500 spatially defined addresses.

10. The array of claim 6, wherein the array further comprises at least one polypeptide encoded by a nucleic acid selected from the group consisting of SEQ ID NOs: 97-1240.

11. A method of selecting a compound that has efficacy for modulating a gene product of M. smithii present in the gastrointestinal tract of a subject, the method comprising:
a. comparing a plurality of biomolecules from M. smithii before and after administration of a compound for modulating a gene product of M. smithii, such that if the abundance of a biomolecule that correlates with the gene product is modulated, the compound is efficacious in modulating a gene product of M. smithii; and
b. selecting a compound that modulates a M. smithii gene product,
wherein the gene product correlates with a biomolecule selected from the group consisting of SEQ ID NOs: 1-96.

12. The method of claim 11, wherein the compound inhibits the M. smithii gene product.

13. The method of claim 12, wherein the compound inhibits the growth of M. smithii.

14. The method of claim 12, wherein the compound decreases the efficiency of carbohydrate metabolism in the subject.

15. The method of claim 12, wherein the compound promotes weight loss.

16. The method of claim 11, wherein the compound upregulates the M. smithii gene product.

17. The method of claim 16, wherein the compound promotes the growth of M. smithii.

18. The method of claim 16, wherein the compound increases the efficiency of carbohydrate metabolism in the subject.

19. The method of claim 16, wherein the compound promotes weight gain.

The application's sequence listing, which the Patent Office published only in electronic form, follows.

SEQUENCE LISTING (96 sequences)

SEQ ID NO: 1 - DNA, 1065 bp, Methanobrevibacter smithii
atgaacaaaataaaatatattattttactattcattttgctcttattgattattccaacaatagttgctgtagatgatagcataaaagctgattctacaattattgttaatgcaagtaatattactgtaggagatattgaaaagataactgtacatgttaatgaagacgcaactggagttattaacataactgttgacggcaaaaattattccgcccctattgacaagggaatagctacttttaagatagataatttggctagtggttcttatgatgttttagccagttatgacggagatgaaaactatctgccaggtacaaacacctccagttttaatgtagaaaaacctggggcttctgcatctgttcctgttaaagctaatgaaaaaaccaaggcaaactctacaattattgttaatgcaaacaatattgctatgggagacagcgaaaagataactgtacgggttaatgaagatgcaactggaagtgtaactataactgttgacggcaaaacatattccgctcctattgataaaggattaactacttttaagatagataatttggctagtggttcttatgatgttttagccagttatgacggagatgaaaactatctgccaggtacaaacacttcaagttttagtgtgggaaaacataatgcgccgatttccgtttctgctaaggatgtaaaagaaggtgaaaatgcagttgttcatgttattttacctgctggtgctaccggttctgtaaaggttactgtttatgataaaagttatactaatcagttgattgacggaaaaactactgtcactgttcctgatttagcgaaaggatcatatatcgttaatgttaattacagtggtgatgacaattatttggctaattcaacacaggtgcctttaagtgtaggtaaaaaagcagtagaaccgccagctattgaaaacaatactgatgaaaacttaaatgatattggaattgatgcttctacaggccttccaatagctatattggcaatagcattgattataattgttgctgttgttattgtaaaaagaaaataa

SEQ ID NO: 2 - protein, 354 aa, Methanobrevibacter smithii
MNKIKYIILLFILLLLIIPTIVAVDDSIKADSTIIVNASNITVGDIEKITVHVNEDATGVINITVDGKNYSAPIDKGIATFKIDNLASGSYDVLASYDGDENYLPGTNTSSFNVEKPGASASVPVKANEKTKANSTIIVNANNIAMGDSEKITVRVNEDATGSVTITVDGKTYSAPIDKGLTTFKIDNLASGSYDVLASYDGDENYLPGTNTSSFSVGKHNAPISVSAKDVKEGENAVVHVILPAGATGSVKVTVYDKSYTNQLIDGKTTVTVPDLAKGSYIVNVNYSGDDNYLANSTQVPLSVGKKAVEPPAIENNTDENLNDIGIDASTGLPIAILAIALIIIVAVVIVKRK

SEQ ID NO: 3 - DNA, 3069 bp, Methanobrevibacter smithii
atgcattcatatagttggataaatggcataatatggatgctaagaatattcttatatataatggagagattaattatgaataaaaagatacttgtttttcttcttgttgctatagttgctctttcactttcagcagtttctgctgctgataacacaactgatgatgttagtgtattatcatcttatgatgataatgcagttgtaagtgaagcaactaatgatatatctatagatgttacagctaaagatattacttatggtgaaaatgcaactgtcgaagctaaaataattccaaatactactactggtaatattaaattcagtttagataataaaatcaatcaatctggagttattgctaatggtagtgcaagtgtaatttttacaaacttagaaattggtaaacatagtgtaattgcaagttataatggaactaattccaccccatttgtatttaatgtaaataaaatttctgtgtataacatgactatagatgcacctgctgtattctatggaaataatgtttctgcagttataactttacctgaagatgcaactggtgatgtaaatataactattggcaataaaacttacaatggaaaacttgttagtggtaaaactactattgctataccaaatttagctacaggaaatactaatgctactgtagtttactttggtgataaaaaatatgctaataaaactattaacactactttcactgtaactggtaacactgttacaaatgatacctttttcacttactttgggaaagatggtgttttaaataatgatattaccttttctgatttaatatttgcaggtaatttcagtggacttaatttaagtacccttactattgataaaaaaatcaatttaattggtgaaaaagctattttaaaggatatttctcttgtaattaaagcagataatatttctgtttctaattttgccattgttttaactaacactagtggtgttgaatcagcaattgatgtaagaggagctaatgcaaatataaatgccaacatattttcagttaatagtgcttttgataaaaacagttttgtaattaatgctgaaaatgcagttaatttaactattaacaacaacactattgtttattccggtaaaactaatggcaatggcattaataatattattagaataattgattctgataatgtgaatattttaaataattatatttttgctgaaatcccttcagttcctgtaaattatatgcctcctacttgggctgctactgtaatgtctgcaggtatttatgttgaaggatctgctaatttaaatatagcttcaaacaatattgctattgaatataacaatgctagtggagctcatgatactattcataatttatacattgaaggtggaaataatgcaattatagaaaacaacaatataagtaccaaaggtcatacctatgtttacggtattactattagtggtaaaaactttacaatagcatcaaatgctttttactctgattctgataactattatgctgatggtattcaaatatatgacaattcaaatggtattttaaaagacaatgaagtgtttgttgaatctccagttgttgcatatggtatttactcaagtaattggggtgacaaggccaataacattacatacaacaacaataatgttgtaggtaactccagttacatttatggtatttatgtaagtggaaataatgaaactttaattggaaacgaaataactcttgttggtaactttactacaggtgttgcatctagtgcaagtactgtaaccctaaataaaaatgatattatcactaatggtaataatataggtaatgcaagcaaatgcggtgactctatcattgctgaaactaccggtgttaaaattgcttatggtaatgcaactgtaactaactgtactgttaaaactactggtgaatacacagttaatactactggtgcaggatctgtaacttataattctttagtttcaaatgttggtttaggagataaaactgttcaggctaataataaaactattgtagcaaataatggtcctaaattcttaattgatgttccagaacttgttaaaatttatggcagtgctgataaacttattgctattttgactgattcaagtcataatcctatagcaaatgctaatattacatttaatattaatggcagaaattatacaaaacttactaatggaactggtgttgcatctatggatattaatttagtatcaggatcttacaaagtaactgctacttatgaaaatactactgtagaatctagcataattgtaactccaactatattagctaatgatattgttaaattctatcgtaatgatactcattttgttgcaaaattcactgacagcaatggtacagcattaaaagataatactactgttaaattcaatattaatggtgtattctataaagcaaatattactaatggtactgctacattacgtatttggttaaaccctggaaaatatgttttaactgcattcaattctgtaacaggtgaagaattaggatttaatgttactgtattatcaactgtaataactgaaaacttagtaaaatactacaaaaatgaatcacaatttgttgttaaagtattaaatggtgatggaacaccagctaatggtacaaatgtaaccttcaatattaatggtgtattctacactaaagaggttattaatggtactgctacattaaatattaatttatatcctggtgattatatcattacaactatgtatggtaaatatgcagttggaaataatgttactgtattgccaactttaattacaaaagatttagacatgaaattccaagacggcagcaatttcactgcaaaaactttagatggtcaaggtaaaccattagctaatcaaaacataacatttaatgtaaacggtgtattctacaacagaacaactgatgaaaatggtatggctaacttactaattagattaaatccaggtaaatatattatcacatctatctggaacgaataccaagttggaagaactataacaattgcttaa

SEQ ID NO: 4 - protein, 1022 aa, Methanobrevibacter smithii
MHSYSWINGIIWMLRIFLYIMERLIMNKKILVFLLVAIVALSLSAVSAADNTTDDVSVLSSYDDNAVVSEATNDISIDVTAKDITYGENATVEAKIIPNTTTGNIKFSLDNKINQSGVIANGSASVIFTNLEIGKHSVIASYNGTNSTPFVFNVNKISVYNMTIDAPAVFYGNNVSAVITLPEDATGDVNITIGNKTYNGKLVSGKTTIAIPNLATGNTNATVVYFGDKKYANKTINTTFTVTGNTVTNDTFFTYFGKDGVLNNDITFSDLIFAGNFSGLNLSTLTIDKKINLIGEKAILKDISLVIKADNISVSNFAIVLTNTSGVESAIDVRGANANINANIFSVNSAFDKNSFVINAENAVNLTINNNTIVYSGKTNGNGINNIIRIIDSDNVNILNNYIFAEIPSVPVNYMPPTWAATVMSAGIYVEGSANLNIASNNIAIEYNNASGAHDTIHNLYIEGGNNAIIENNNISTKGHTYVYGITISGKNFTIASNAFYSDSDNYYADGIQIYDNSNGILKDNEVFVESPVVAYGIYSSNWGDKANNITYNNNNVVGNSSYIYGIYVSGNNETLIGNEITLVGNFTTGVASSASTVTLNKNDIITNGNNIGNASKCGDSIIAETTGVKIAYGNATVTNCTVKTTGEYTVNTTGAGSVTYNSLVSNVGLGDKTVQANNKTIVANNGPKFLIDVPELVKIYGSADKLIAILTDSSHNPIANANITFNINGRNYTKLTNGTGVASMDINLVSGSYKVTATYENTTVESSIIVTPTILANDIVKFYRNDTHFVAKFTDSNGTALKDNTTVKFNINGVFYKANITNGTATLRIWLNPGKYVLTAFNSVTGEELGFNVTVLSTVITENLVKYYKNESQFVVKVLNGDGTPANGTNVTFNINGVFYTKEVINGTATLNINLYPGDYIITTMYGKYAVGNNVTVLPTLITKDLDMKFQDGSNFTAKTLDGQGKPLANQNITFNVNGVFYNRTTDENGMANLLIRLNPGKYIITSIWNEYQVGRTITIA

SEQ ID NO: 5 - DNA, 7593 bp, Methanobrevibacter smithii
atggtaagtgcaatagaagttgaggagagtgataattcgactacttatcaattaagtagtattgattcttctcaggaaattgctgctggtgatactgattctagtttggaatcaccaacttcaggaactgtttatgtttctaaaactggtagtgattcaaatgatggttcaacaaaagacaaagcattagctagtttaactcatgctttaaatgttgttccaaatagcggaaatattataatgcttgatggagcatattcatatagttctatttctattccttcttctaaaattgttacaattgaaggtgaaggaaatgttaatttaacaggtttaagctcatattctacattcattacaaatgaaggggaattaactcttaaaaatatcaatattgtaaattgtaaaggagatatgattgatagtgcagcttttaacaataaaaacaaattaaatgtaataaattctacttttattaataataaattagtattttataataatggagatttattgattgataattccagtttcttcaatagtttaggttgtgttgttaatgctgatgaagattctagaacaacaactgttacaaattccaaatttattaatggtaaatatggtaattctattttgtcattttctagaaataagttccctacactaattgaaaactgtacttttgaaaatttttattctactgctaatactggtggaattattggagtaagtactattggagcagattttagaattaacaactgcagttttattaacaatactttagatgcaaaaggaatgtttacaccaacatctgataaatacggtgtagttatacgtgttggtattacaacagatgtattatttaacattacaaattgtgtttttgcaaataataaaggtattaatggagcaattggtgttattcagcaagttaactcttatattaatgtaactcattctgtttttgtaaataatacagattactatggaaatactattgtaaatggcggttcaagaggaacaagcctttatgattataactggtggggaagtgataatcctgattttactacattagttaaagatacaaaaaatccagttaataaatgggctattttagatatggattatactccttcaactaatataaaacctggaaacacaattacagttgcagctggtttaaccaaatatactgatgttgacggaaatatacatatattaaatgataaacttccagattatggaaatgttacttttgaattccaggatggaactaaaaaagtggtacctattaaaaatggactggctaaaatagattatgtagttaaaagtggagaaaacattgtctgggcaacattgaataatcaaaaaacaaatattacaattgtaactaaagatttagatactatttatgtatctccagatggtgatgactctaatgaaggatctaaattaagtccggttaaaacaatagctaaagcaattgaacttgcaaatactggtaaaatagttcttcttcagggaaactatgttgaaaacaatgttattgtaaataaaaatgtaaatataactggtgaaggaaatgttgttgttgacggtaatgcttcaggagtagttttcactattaattccggaaatacagtttatttaaaaaatttaaatgttaaaaatgcagttaatgctaaagatggtggggctatttacaataatggagctaatctttatttggattctgttaatttatatgaaaatatagcaggaaatggtggggctatttacaatactaacaaaggaactattgtaattactaattctaaattacatcataacaataacacagctaaatccggatggaataaaggaggatcagctatttacaatactgcttcatcaaaagtaactattgaaaattgtgaaatttactcaaataatgctcttagtgacggaacaattcagtcatataattctgatttaataatcaaaaattcaaaattcttcaataacactgctaaatggggaggagcattttatggtgaaaatgcaaatataattgtagataactgtaacttctacaataatactgctaataatgcagttatttatgcaagaacatccactgtaaacattaccaactctttcattcgttttaacaaagcaattaattatccaagtgcaattcagaattatggaagtaaaattacaattgataacactacaatagctaataatactggtactaaagcagctgttataaatcaggatttatccagtgttagtactagtttaattataatcaattcaagaatttataataatactaatggtgcagtttataatgataaatcttcttcagataattcaaacattacattagatataaataactgtgctatttttaataatggagacaattctgttattcagcatggaactaaatctagcggtatttatataactgcaaatactaactggtggggttctaataaaaatcctgcagatattgccggcgatggagttaatattgataactggattattttacaggtaacttatgatgacaggggaattcctgttctttacgaccaatttgacattgaagctaatttaaattactatgttacaaaagacggtaaaaatggaactgttttaaataatcatatatttgatggtttagttgttaattttgatacaacaaccggttatttaactaaaaataaagcaattatttctaatggaatggctgtttcaaaatacagtgttttaactcaaacagcaaatattattgttgttaaatttgataatcagacaattactatagatttaaatgcaaattattataatggaacaacttatgtttctaccgatggtaaagatacaaatgacggatctatagattctcctgtagcttctcttgaaaaggcattgtctattaataaaaatggtaatattataattcttaatggaacttatattgtcagaaatgtaaaaatcgatggaaattacaatattgctggtgaaggcagtgtaacccttagcggtgcagatgttgagcgtgttttatatattcttgaaggaaaagtaataattaaaaatattaactttacaaatggaagaactttaagtgaaagcggagctttaattggaaatgctggtgacttaacattaatcaatactacattatccaattcaaagtcaagtaagaatggaggagctatttataatgcaggtaatttaacagtaattaatgctacaatagctaataacaaagcaacaattggtggagctatatttattgataaattcaatgattacaattacaatatcaaattccaaaatgttgtatttaaagataatgaagcttcaggagagaataatcatgcaggtggagctatttatgctcaagctgttggaggacaaatattaatcgataattgttcatttatttcaaattcagtttctaaaaactttgctggtggagctattcatgcccttcagcttattgatggaataaaaattacaaattccaaattcatcaataacactgcaaattcacctgaaaattatggtgggggagcaatatgttttattggtggaaacactgaaagaatgggtaaattagatatttctgattcagtatttgaagacaataaagataatgtagctggagcaatctatatcagaggttcaactttagatatatcatactctgctttaatcaataatggaaacacagctatatacaaaggagttagtagctatgtcattaccaaaataacagcagataataattggtggggaactaataacaatccgtctgcatttgtcaatggtgaaattgtttcaaaatggattgtaatgacatttactaatgatactcccattactcaaggaaataaagttttattaattgtagctttagatactttaaatgacggatccaaattagataaagcattagaatttgcacgtcctgtaacaattgtaacacctacagaaacattcagtaatcagtataatgttgagtacacaatccctgaaaaagtaactattatttcagctactatagatagtcaatctgtttacttatattcagctaaaacaaacacaacagttaatataaatgatactactgttaatttaggtagaaatataaatttaactgctgtcataaaagatacaattggaaataatattcctatgggtgctgttgagttttatattaatgataaactggtaggtagtgctgatgttaaaaatggtgtagctactttagttctatcaaataattatgcagaaggcagttataatatagttgcaaaatatggagatgttaatggtgtttataatcagagtatggataaagcagtccttaaagtcatttcaacttctttaattgtaacaaattcaacatttttcaacttctttgataatgatggtatgcttaaagaaagtattgatgcaaatgaattaatattttcaggtttatttagtggccttggagtaaatacaattactattgacagagctattaagcttaaaggcactaattcaactactttagataatatctttttagagttaatcggtaatggcatatctgttgataactttacaataaatataaataaacagaattatggtatttatataacaaatgtagataaggttattgttaaaaattcattaattaattttaatgatgttggtacatctgatgcaatggctatttatgcaaatggagtaagtaatttacagttagttaataacacaatcatatattctggtcaaagtaaaggcaaaactcttaatcatccagttcatattgatgattgtaaaggtgctgtaattgaaaataacactatcaatgctaaaatgccttctcttgcaattgattacgataaaattacttatgcagctataacttacagtgcagcagtctttatagacaatagtgataatgttaaagtcataaataatagagttacaaatgcatatactactttcggcggaatgtttgatactattgaaggaattttaataagagcttctaaaaatcctgttgtcaaatcaaatataattgatgtaacaggacataattatacctatgctttaaaatttgtaagtgtaatggacagtgattataatgttgtcggatgtttaaacataaatgttgcagacaatatcatcacttcaaaatgtgattattactatgcaaatgctattgaagtagacggccctatcacaggtaaattatttaataattctgttagtgttgaagctttagatgttgtttatggaatatattcacaagcaataaatggggcggttaatgttgattatataaacaatacaatattagctaatgctcatacagcttatgctatggagcttatgggaaatgatgaaaaggtcactggaaatacaataatctcaaaaggtaatattacaatgggtataatgtcttcttctaaaaatcttaaagtatttaataatacaattaaatctttaggaagtggaattggacctattactggtggtgatgttcttggaggagcaaatactggaattatagttactggagataaaaacagtgtaaaatactctaaattagaagcttataacaatacaataattgctaatggtgattatacagtaatgattgataaacgcaatactcaggtaaatacagttacgggcaattatttggtatctggcaaattccttggagataaatctgttaatgcttcacaattaaataaagtttataataacactcctgatgcattcccaacagtaattgtagttaaagatgatgaattatttataaatgagaattatacaatctcattaactgatattcatggaaaagaattgtctggaatgaatattataattaaatgtggagataaagtttggaaggaagttactgatgaatttggtaatgtttcaataccaatagctagtttaggtgttggaactcatttgattgaagtagtctttgaaggtagcggatattatgctccgtcaaaaacactaaacaatttaacagttaacaaattcccgtctgttataaatttaacttctgaagatgtttatgttggatctgatgtaactattaaagcggaagttactgatggtgtaactggagaaataatatttattgttaataataaggaatatcctgttttaataaaagacaataaagctattttatctatagctaatttaagtagtggaacatatgatgttatagctaaatatgatggtaatgatttatatggttctgcatcagctaatacaacttttaaaataaataaatattcatctgatattaaagctgatacaaatgttagtggcaatgatttaagtgtaagtattgttttacctgaagatgctactggaaatgtaattgttagtgtagatggtaaaaaagaaagtgttgctgtaaacaatggtagtgctaaagtggttattaataatttaactagtggaaatcatagtgttgaaattaattatagtggtgatgataaatatgcttctgctactttgattagaaacataacagtaattcctgtagaatttaagttaagtattaatgaacttattaaattccagggaggaacagacaagcttatagctactttaattgatggtcaaggaaatccaattattaacgcatcaattgtttttactgtcaatggtgtgaattatactaaatacactaataagagtggtgttgcttcaatgggcattaatttaaaagccggagtttataatgcatcagctacttacaatagcacaacagttagctcaacagtaacaattaaatctactgttattggctatgatattgttaaaatgtttagaaatgcaactcagtattctgcactattcttagacagcaacggtaaggctttagttaacgctactgttaagtttaacattaacggtgttttctatactaaatctaccaatggtgaaggtatagctactttaaacatccaactgcttcctaaggaatacattataaccaattataatcttgttaccggtgaggaaaactcaaataaagtaactgtcaaatcattacttgttgataactctgatttgattaaatactacttaaatgaatccagctatactcttaaagtaattggtaaagacggtaaagtagcagctggtcaggaagtaaccttcaacatcaacggagtcttttaccacagagtatctgatgacaatggtatcgttagcttaggtattaagttacgcccaggcacttacatcgtaacagctgaatatgaaggctgctgggtatctaacaacattacagtattgccaactttaattactaaagatcttgatatgaaatacttagacggcagcaacttcactgcacaaacattagacggtcaaggcaaagcattagctaagcagaacatatcatttaacgtaaacggtgtattctaccataaaacaacagatgaaaacggcatagctaacttgaatatacgcttaaacccaggtaaatatatcatcacatctatctggaacgaataccaaattggaaacaatattacaattgcttaa

SEQ ID NO: 6 - protein, 2530 aa, Methanobrevibacter smithii
MVSAIEVEESDNSTTYQLSSIDSSQEIAAGDTDSSLESPTSGTVYVSKTGSDSNDGSTKDKALASLTHALNVVPNSGNIIMLDGAYSYSSISIPSSKIVTIEGEGNVNLTGLSSYSTFITNEGELTLKNINIVNCKGDMIDSAAFNNKNKLNVINSTFINNKLVFYNNGDLLIDNSSFFNSLGCVVNADEDSRTTTVTNSKFINGKYGNSILSFSRNKFPTLIENCTFENFYSTANTGGIIGVSTIGADFRINNCSFINNTLDAKGMFTPTSDKYGVVIRVGITTDVLFNITNCVFANNKGINGAIGVIQQVNSYINVTHSVFVNNTDYYGNTIVNGGSRGTSLYDYNWWGSDNPDFTTLVKDTKNPVNKWAILDMDYTPSTNIKPGNTITVAAGLTKYTDVDGNIHILNDKLPDYGNVTFEFQDGTKKVVPIKNGLAKIDYVVKSGENIVWATLNNQKTNITIVTKDLDTIYVSPDGDDSNEGSKLSPVKTIAKAIELANTGKIVLLQGNYVENNVIVNKNVNITGEGNVVVDGNASGVVFTINSGNTVYLKNLNVKNAVNAKDGGAIYNNGANLYLDSVNLYENIAGNGGAIYNTNKGTIVITNSKLHHNNNTAKSGWNKGGSAIYNTASSKVTIENCEIYSNNALSDGTIQSYNSDLIIKNSKFFNNTAKWGGAFYGENANIIVDNCNFYNNTANNAVIYARTSTVNITNSFIRFNKAINYPSAIQNYGSKITIDNTTIANNTGTKAAVINQDLSSVSTSLIIINSRIYNNTNGAVYNDKSSSDNSNITLDINNCAIFNNGDNSVIQHGTKSSGIYITANTNWWGSNKNPADIAGDGVNIDNWIILQVTYDDRGIPVLYDQFDIEANLNYYVTKDGKNGTVLNNHIFDGLVVNFDTTTGYLTKNKAIISNGMAVSKYSVLTQTANIIVVKFDNQTITIDLNANYYNGTTYVSTDGKDTNDGSIDSPVASLEKALSINKNGNIIILNGTYIVRNVKIDGNYNIAGEGSVTLSGADVERVLYILEGKVIIKNINFTNGRTLSESGALIGNAGDLTLINTTLSNSKSSKNGGAIYNAGNLTVINATIANNKATIGGAIFIDKFNDYNYNIKFQNVVFKDNEASGENNHAGGAIYAQAVGGQILIDNCSFISNSVSKNFAGGAIHALQLIDGIKITNSKFINNTANSPENYGGGAICFIGGNTERMGKLDISDSVFEDNKDNVAGAIYIRGSTLDISYSALINNGNTAIYKGVSSYVITKITADNNWWGTNNNPSAFVNGEIVSKWIVMTFTNDTPITQGNKVLLIVALDTLNDGSKLDKALEFARPVTIVTPTETFSNQYNVEYTIPEKVTIISATIDSQSVYLYSAKTNTTVNINDTTVNLGRNINLTAVIKDTIGNNIPMGAVEFYINDKLVGSADVKNGVATLVLSNNYAEGSYNIVAKYGDVNGVYNQSMDKAVLKVISTSLIVTNSTFFNFFDNDGMLKESIDANELIFSGLFSGLGVNTITIDRAIKLKGTNSTTLDNIFLELIGNGISVDNFTININKQNYGIYITNVDKVIVKNSLINFNDVGTSDAMAIYANGVSNLQLVNNTIIYSGQSKGKTLNHPVHIDDCKGAVIENNTINAKMPSLAIDYDKITYAAITYSAAVFIDNSDNVKVINNRVTNAYTTFGGMFDTIEGILIRASKNPVVKSNIIDVTGHNYTYALKFVSVMDSDYNVVGCLNINVADNIITSKCDYYYANAIEVDGPITGKLFNNSVSVEALDVVYGIYSQAINGAVNVDYINNTILANAHTAYAMELMGNDEKVTGNTIISKGNITMGIMSSSKNLKVFNNTIKSLGSGIGPITGGDVLGGANTGIIVTGDKNSVKYSKLEAYNNTIIANGDYTVMIDKRNTQVNTVTGNYLVSGKFLGDKSVNASQLNKVYNNTPDAFPTVIVVKDDELFINENYTISLTDIHGKELSGMNIIIKCGDKVWKEVTDEFGNVSIPIASLGVGTHLIEVVFEGSGYYAPSKTLNNLTVNKFPSVINLTSEDVYVGSDVTIKAEVTDGVTGEIIFIVNNKEYPVLIKDNKAILSIANLSSGTYDVIAKYDGNDLYGSASANTTFKINKYSSDIKADTNVSGNDLSVSIVLPEDATGNVIVSVDGKKESVAVNNGSAKVVINNLTSGNHSVEINYSGDDKYASATLIRNITVIPVEFKLSINELIKFQGGTDKLIATLIDGQGNPIINASIVFTVNGVNYTKYTNKSGVASMGINLKAGVYNASATYNSTTVSSTVTIKSTVIGYDIVKMFRNATQYSALFLDSNGKALVNATVKFNINGVFYTKSTNGEGIATLNIQLLPKEYIITNYNLVTGEENSNKVTVKSLLVDNSDLIKYYLNESSYTLKVIGKDGKVAAGQEVTFNINGVFYHRVSDDNGIVSLGIKLRPGTYIVTAEYEGCWVSNNITVLPTLITKDLDMKYLDGSNFTAQTLDGQGKALAKQNISFNVNGVFYHKTTDENGIANLNIRLNPGKYIITSIWNEYQIGNNITIA

SEQ ID NO: 7 - DNA, 756 bp, Methanobrevibacter smithii
atgaatatgaaatatttaataactgctttaattgtagctttactttcattaagtactgtaggtgcagttgatattgatgctgtaaatgatgcaattataagcgataatgataataatactccagttattccagatcatggaaatgaatctgttgtaactgataaaaatgcaagtactgtaaataatactactaattcatcaaacagtactgataatgtaaattccactaatataacaactggaaatacaacaaatgtaactactaatggtactttaaatgttactaatggaactaatggtacagtaaatattacaaatcaaagtaatgtcactgtaaatattacaaattcctcaaatgtaactgttaacactaccaattcctcaaatgtaactgttaacactacaaattcaactaatactactgtaaatggtactaatactacaaatactactgttaacactacaaattcaactaatacaactgttaacaatacaaatacaaccaatactacagtagacactggagataattcaacaaacactactgtagataatgatgataattcaaaagatacagttgtgaatactcctgattcaaatagtgttcatgttactggtgatggtgctgatgatgtagtatttaatgatagtcaagctactacttcttcatctgatttagcaaaaaccggtattccagtagctattcttatattagcattattctctattattggtgtatcatttaaaagagaataa

SEQ ID NO: 8 - protein, 251 aa, Methanobrevibacter smithii
MNMKYLITALIVALLSLSTVGAVDIDAVNDAIISDNDNNTPVIPDHGNESVVTDKNASTVNNTTNSSNSTDNVNSTNITTGNTTNVTTNGTLNVTNGTNGTVNITNQSNVTVNITNSSNVTVNTTNSSNVTVNTTNSTNTTVNGTNTTNTTVNTTNSTNTTVNNTNTTNTTVDTGDNSTNTTVDNDDNSKDTVVNTPDSNSVHVTGDGADDVVFNDSQATTSSSDLAKTGIPVAILILALFSIIGVSFKRE

SEQ ID NO: 9 - DNA, 612 bp, Methanobrevibacter smithii
atgaaaaaagataagaagaaacttatcgtcatgctgttaataattgttgttatcctacttttaacactaataacattaatgactaattttggaaaggaatccagtgaaataaatattataagcaaggatactttaaaaaatggagacacaatttcaattacactaaaagattcaaatggaaatcccatagctgatcaaaaagtagatataataattgaaaatgaaaagaatcaacaagtaacaactgatgaaatgggcaatggtgtgctgcaacttaacagaatcagtgacggacaatacactgtaaaagtcatttacaacgggaacgacaaatattccaaaagtgaaactacacaatcattaacaatatctgaccaagccacatcattaagtaataatgaaagtagttccagcgataaaactgaaagcataatgagtgaagacggatattcgtataaaactggatatggacctgattatgattgtttaggagttagtcgtgaagaagcagctgctaaaggatggcactatattccaggtatggatgatgaaggaaatgatatgggagcatatgttccatatgattataatgcaggatgttaccatacataa

SEQ ID NO: 10 - protein, 203 aa, Methanobrevibacter smithii
MKKDKKKLIVMLLIIVVILLLTLITLMTNFGKESSEINIISKDTLKNGDTISITLKDSNGNPIADQKVDIIIENEKNQQVTTDEMGNGVLQLNRISDGQYTVKVIYNGNDKYSKSETTQSLTISDQATSLSNNESSSSDKTESIMSEDGYSYKTGYGPDYDCLGVSREEAAAKGWHYIPGMDDEGNDMGAYVPYDYNAGCYHT

SEQ ID NO: 11 - DNA, 462 bp, Methanobrevibacter smithii
atgctagatgatttattatgcaataaatcttttagtttgtatgttttccattcatcatcaaatccgctaaatcgcaatttaagccaggtttactatgccaatgaatttgaagcactgggaaataatctgatagctgcagttggaacctacttcagcagcagctgtggaaaatacgaaatcagcatttatgtaaatgatatattaaaacacacacaaaacggaacaagtgcatttggcggtttttcaactgtcaaattaaataattacattccagttaacaaaggagacattttcagagctgtaattaaaggtgtaaatgtcccattatccataaataccagagttcataatgacgatttagctactttaaatataaatctgatacctggaaaatatatcataacagctattgaaccggtaaccggattagatatggggtatggagtaactgtccttaaatag

SEQ ID NO: 12 - protein, 153 aa, Methanobrevibacter smithii
MLDDLLCNKSFSLYVFHSSSNPLNRNLSQVYYANEFEALGNNLIAAVGTYFSSSCGKYEISIYVNDILKHTQNGTSAFGGFSTVKLNNYIPVNKGDIFRAVIKGVNVPLSINTRVHNDDLATLNINLIPGKYIITAIEPVTGLDMGYGVTVLK

SEQ ID NO: 13 - DNA, 8640 bp, Methanobrevibacter smithii
atgagaaaattttttgaattctataattggtgcgttgataaaatggttaaaaagatatttgctgttgttggatcggctttattattcttattaataattggagctagttctgcagcagacattgatataaataatgatggaacatttagcgatgttcagaatggaataaatcaggctcagtctggtgatacaatttatttaaacaatcacacgttcacaggatccggcagtgagatttctgtagctggcggatggttttctaataaagatgagattactattgacggttctattaatccaaacaaaggtggaaccggtaatgaaatgtctacattagatgcaaaatcaagttcccgtgtgtttaacattggagccagcagcataactttgaagaacattataataactaatggtaaatattcaggacgtgatgcaaatggtgctggtgtttacagttcaggttctaatcttgttttggaaaactgtgttatcagtaactgtgaagcatcatctagctcaagaggagatgttcattctgcattatattcagaaaatacagtaacattatctcgttgtactttggttaacaataaagctaccagtacttacaatactgtaacaaatagttatgttgtcagaactgcaagttttgacgggtcaatgactgactgtattgttcgtgataattatgtttcttctataggggcaatggctattggaattacaattgttggttccagcagcaataaagtaagtaacactaaatttatgaacaattatgccacatcaacaaatggaaatgcctttggtgctgcattacatgtattgggtacagtttctaattgtacattcgaatataatcaggcaaattcggatgttaataactctcatgccggtgcactttgtttcagacctggaagtactgtttataactgtacttttataggcaatattgcatataggggagcggctaccactttccatgcaagcggtgaattgaaagattgtatatttattaacaacactgcaaccggttttggtggtgcaatctctaccggatatgacggtactacaggtcaaaaggtaaaaatttcaaattcttattttgaaggaaacgctgcacctatcggtggtgctattactactcacggtaacgatataactgtagataactccacattcatatcaaataaagctgctgatgatggtggagctgtttatgttgttgatgatggaatcacggttttaaattctaattttggaaataactctgctaaaaaccatgccggagctatttatgtaaaaggaaataatgttaaaattcaaaatgcaacatttgtaaataattctgcacacttcgcaggtgctgtgagggtggaaggaagttctgttaatgttttgaacgctacttttataggaaataaagctatttctgatggtgtttcaaaatctcaagcaggagctttaggaatcagtggaaataatgttaatatagacagttcttactttgcaaataacactgtagaaggtgatgcaggagctatatgtgtaataggaagtcatataaaagtaaccaattcacagttctactccaaccatgctaatccatttaacaatgatttaaatactggtttaggtggagctatatatactatgggtaataatgtaacttatgataatgcaatattcagatataatacagctgttaacggttctgctttatttgtagacggtgtagcttctcttaaaaatattgtattttacagaaaccaggcttacacttatgtattgcctattattgttcaaaatccgaaaactccttatggagtaactgttaatgttactgtagtgattattggtggaaacaatattgcaaatgcaatacatcatgtaggtcagcttaatgatatttcatttgataatgtaacttacttatttaatgtaaacggaacaatcatgaacagaacaacaggagcagatgaaattcatccggttgatggtgtggaaaacagtaaaaacggtactttaatctatagggatgaacgtgaaaatactcagtcaatcaatccgattgttatttataatgaagacggaaacattatttacaatgaaactttaatctcttcaatttatggtgatgtcaggttttcattaagcggtcttgctccgggtaattataccattaaagcagaacaccctgaagatctcttctataaagctatcaaaaatgaaactaattttgaagtagttggttttgttgatttggatgttgatattacaactgataaaaattattatggattggacgaggaagttgaatggactatcagtttaactaaccatggtccgcatactgacaataattgttatgtaaatggaattaaacttgaggatattgttggttttactccttcaaaaggtacttttgatgcagctacaggtatatggaaagtaggaaaattagccaaaaatgaagttgttactcttaaagttaaaacaaaaactaccagtttaggtactgttactctgactgttaatgcagtaaacagtactgaagatactaacataagtaacaatgtagctactaaaaccatatacatacaagaactgcctaaggtagttcctacaaaagatgtaaatgttacaaaccctaactatggtgataaagttaaatatactatagtggtaagtaatgtcggtaagattactgctgatgtaactttaacagatattcttgataaaggtttgatatttactggtgctagtggtaattatgaatatgattctaccacacgtactgttacatggaatattgatggtttagctgtaggtcaaaacttaacattctatgtatatgctactgtagatgcttatggtgttttaaacaatacagttactgttggagacaatactgttataagaaatgtaactgttcctgaaattactcctgataaaactattgataatgattcacctaacttcggtgataaagtatcatatactgtcactgttaccaatggcgaatttgaagctaataatgttattgttaaggatgttgttgggaacggattaaccgttactgatattagtgataacggtcaatatgatccgattacccatactattacatggattgttgatttagctaaaaacgaagtaaaaacatttactgttgaagctactgtttcaggctatggaaatatatctaacaaagttgttgttggaaataaaacaatctttaaaaatgtggatgtacctgaaattactcctaaaaaagatgttaacaatacaactcctaacttcggtgaaaatgtagcttatactattgttgtttctaatgacggcattagtgatgcaaaacaagttgtaataacagatactcttgcgaaaggtcttaaattccttggagctaattacaatggtgtttatgatgaaaatacacatactgtaacatggactttggatattgattcaggtaaaactgtagaattaaaagtaaatgttactgtggaagattacggtgttttagttaacagggtgactgttggagataaaacaagttctgtagatattgcagttccggaaattatccctgataaaacagctaatgtaactgatgctaactttggtgacaatgtaacctacactgttactgttactaatgacggtgatgtggatgctagtcaggttgtcattgttgaccaattaggtaacggccttaaatatgtcagttcttcagatggtggtgtttgggatgaaaaaaccaacactgttacttggattgttgatttggctgcaggcaaaaccaaaacattaaatgttgtagctactgtggtagggtatggtaatgtaaccaactctttagctgtaggcaataaaacttctaaaataaacgttaatgttcctgaaattactccaaataaaactgtagataacaaaaaccctaattttggcgacaatgtaacttatactattgttgtttctaacgatggtgctgctgatgctaagaatgttgttgtaaaagatattcttgctcctggtttcaagttcattgaagctaattatggtggtgtttatgatgaacttacccgtactgtaacctggattgtagatgttaatgctaaaggtcatgttgatttaactattaaggttattgttgaagattacggtgttttaaccaacaatgtaactgtcggaaataaaacaagttctgtaaacattacagtacctgaaattattcccaacaaaactgcagacattgaaaatcctaactttggtgatgaagtaacatacactgttaacattacaaatgtcggcaaatccaatgctgtcaatgtagctgttcgtgatgttttaggtgaaggtttagaacttatttcagcagacggaggagtatataatccgattacccgcactattacatggactgttaatctaaattcaggggaaacaaaatcatttaaagtagttgctaaagtaattggatacgggaatgtaaccaactctttagttgtaggtaataaaacctctgctgtagatgttgatgttccggaaattatcccaagtaaagatgcggacaataagtatcctaactttggtgatagcatagattacacaattactgttaataacatcggcaaagcagatgctaaacatgtagttgttgtagaccgtttggataatggattgaaatatgtcagttcttctcataatggtgtttatgatgaagcttctcatactgttacatgggtagttgatattgctgcaggcagttctcttgatttgactgtaactgctgttgctgatgagtatggtgttttaaccaacattgtatctgttggagataaaagcgcttctgtagatgtaaatgttcctgaaattattcctaacaaaactgcagacattgaaaatcctaactttggtgacaatgtaacttatactgtaacagtcactaatgacggaaatgcagatgctaaagcagttgttgttcgtgatgttttaggtaaagatcttaaatttgtttcagctaccggtacttatacctttgatgaagctaccaatactattacatggactgttgatgtagatgcaggtaaaacagaaacatttactgttgtagctactgttatcaactatggtaatgtaaccaactctttagttgtcggtaacaaaacattcaataaaaatgtaaccgtacctgaaatcactccagacaaaacagtagacaatgaaaaccctaacttcggagatgatttaacttatacagttactgttaaaaacgaaggtaatggaaacgctaatgatgtaattattgttgatgctcttggcaaaggtttagaatatgtcagttctactggtaactatgataataaaaccaatacaattacctggaaagttgacctggcttctggagaaactaaaacatttactgttgttgctaaaatcgtcggatacacagatgtaaccaatgaagtaactgtaggtaataaaacagctgctgtaactgtagatatacctgaaatcattcctgctaaggatgttaacaatacaactcctaactttggagataaagtggaatacactataactgttaacaataatgctaataaagatgcaaaacaagttgtcatagttgatactcttggcaaaggtttaaaattcattaatgcaagccataacggcaaatatgatgaatctacaagaaccattacctggattattgatttgggtgctggtgaaagtgcggtatttagtgtaaatgctgctgtagaagcatatggaaacataaataacacagtagttgtaggaaacaaatcagctacaaaaaacattacagtacctgaaattattccgggtaagtctgttgatgttgaaaatcctaatttcggcgatactgtaacttatactgttgttgttacaaataatggtgttgttgatgctaaacaggttgttgttaaggatattcttgataaaggattgaaatttgttaaagctactggcgagtatacttttgatgaagatagtcatactgttacatggattattgatttggctaaaggtgagtctcaaactttctatgtgactgctgttgctgaagcttatggtgttttaatcaatgatgtaactgttggggataacactgcttctgctgatgttgttgttcctgaaattattcctgataaaacagctaatattactaatcctaatttcggtgataaggtagattatactgttactgttactaatgatggtatgggggatgctaataatgttgttattgttgatatgcttggtgaaggtttgacctttgtaagtgcttctgataatggtgtttgggatcctgtaaaacgtactgttacctggattgttgatttggctaaaggtgaaagtaaagtatttagtgtgattgctactgtttcaggttatggaaatgttactaactctttagttgttggtaataaaaccatttctgttaatgtgactgttcctgaaatcattccagataagactgtaggtattgaaaatcctaatttcggtgataatgtaacctacactgtaaaagttactaatgatggaattggtgatgctaataatgttgttgttaaagatattttaggtgaaggtttaacttttgttgatgctactggtaattacacatttgatgaagctacacgtactgttacttggattgttgatttggctaaaggtgaaagcagaactttctatgttaatgctattgtttcaggttatggaaatgttactaactctttagttgttggtaataaaacaaccggtgttaatgtgactgttcctgagattaatcctgataaaacagctaatattactaatcctaatttcggtgataaggtagattatactgttactgttactaatgatggaattggtgatgctaaggatgttgttgttcgtgatgttttaggtgaaggtttaactttcgttgatgctactggtaattactcctttgatgaagctacacgtactgttacttggattgttgatttggctaaaggtgaaagtaaagtatttagtgtgattgctactgttgtaggttatggaaatgttactaactctttagttgttggtaataaaacaaccggtgttaatgtgactgttcctgagattattcctgataagactgctaatatttccaatcctaactttggggacaatgtaaattatactgttactgttactaatgatggtatcggtgatgctaaggatgttgttgttcgtgatgttttaggtgaaggtcttaaatttgtttcagcaactggtaattactcctttgatgaagctacacgtactgttacttggattgttgatttggctaaaggtgaaagtaaagtatttagtgtgattgctactgttgtaggttatggaaatgttactaactctttagttgttggtaataagactgctggtgttaatgtgactgttcctgaaatcaatccggacaaaacagttgacaacgaaattcctaatttcggtgataatgtaacctacactgttactgttactaatgatggtatcggtgatgctaacaatgtagttattacagatgttttagataaaggattgaaattcttaaatgcaactggaaacttcacatatgatgaaaaaacaggcataattacctggattgttgatttagctaaaggcgaaaccaaaacattcaatgtaaatgttactgttttaggttatggtgttttacctaacactgttgctgttggtaataaaacagctgtcagaaacataacagttcctgaaataatcactgtaaaagaagttaattcctctgatattcatattggagatgaaataacctacactattacagtttccaaccctggaaaaatcaatgcaacaaatgttgtaattagagatattcttcctgaaggattaaaattcatcaatgcttcaaacggcggagtatatgaccctgttactggaattattacatggattttaaacatcacagctaattcaactgttgatttgactgctgatgtatgtgtaaacaaatcaggaaatattacaaatactgtaaatgttggaaacaaaacttccaactgcactatagaatccggagatattgttgatctggaaatacacatagttgctgacaaatccgaaatatatgttggagacaatgttgtctacactgttactgtcataaataatggaccaagcgatgcaataaatactattgctaatatattaataccaaatgcattaagcattctctcatataatgcaacaaaaggaacatttgacataacttcgggcaactggtctataggaaacttaacaaatggtgaaaaagtcgtattaacatttgtagctaaagcattaaacgaaggcaattcaacagtacatgtcaatgtaacaagcgaaaccttcgaagtaatcatggaaaacaactacgacaatgtaactgttaaagtccttaaaaaagcagctccgatcggtccggataaacaggttcatccagatggttcatcttcagataatgaatgtggcaaatctgtaaacttaccgaatacaggaaatccacttgtaatgttgctcttatgtattttaagtgtaatatttgtcggatctagaaaaagaaaattataa

SEQ ID NO: 14 - protein, 2879 aa, Methanobrevibacter smithii
MRKFFEFYNWCVDKMVKKIFAVVGSALLFLLIIGASSAADIDINNDGTFSDVQNGINQAQSGDTIYLNNHTFTGSGSEISVAGGWFSNKDEITIDGSINPNKGGTGNEMSTLDAKSSSRVFNIGASSITLKNIIITNGKYSGRDANGAGVYSSGSNLVLENCVISNCEASSSSRGDVHSALYSENTVTLSRCTLVNNKATSTYNTVTNSYVVRTASFDGSMTDCIVRDNYVSSIGAMAIGITIVGSSSNKVSNTKFMNNYATSTNGNAFGAALHVLGTVSNCTFEYNQANSDVNNSHAGALCFRPGSTVYNCTFIGNIAYRGAATTFHASGELKDCIFINNTATGFGGAISTGYDGTTGQKVKISNSYFEGNAAPIGGAITTHGNDITVDNSTFISNKAADDGGAVYVVDDGITVLNSNFGNNSAKNHAGAIYVKGNNVKIQNATFVNNSAHFAGAVRVEGSSVNVLNATFIGNKAISDGVSKSQAGALGISGNNVNIDSSYFANNTVEGDAGAICVIGSHIKVTNSQFYSNHANPFNNDLNTGLGGAIYTMGNNVTYDNAIFRYNTAVNGSALFVDGVASLKNIVFYRNQAYTYVLPIIVQNPKTPYGVTVNVTVVIIGGNNIANAIHHVGQLNDISFDNVTYLFNVNGTIMNRTTGADEIHPVDGVENSKNGTLIYRDERENTQSINPIVIYNEDGNIIYNETLISSIYGDVRFSLSGLAPGNYTIKAEHPEDLFYKAIKNETNFEVVGFVDLDVDITTDKNYYGLDEEVEWTISLTNHGPHTDNNCYVNGIKLEDIVGFTPSKGTFDAATGIWKVGKLAKNEVVTLKVKTKTTSLGTVTLTVNAVNSTEDTNISNNVATKTIYIQELPKVVPTKDVNVTNPNYGDKVKYTIVVSNVGKITADVTLTDILDKGLIFTGASGNYEYDSTTRTVTWNIDGLAVGQNLTFYVYATVDAYGVLNNTVTVGDNTVIRNVTVPEITPDKTIDNDSPNFGDKVSYTVTVTNGEFEANNVIVKDVVGNGLTVTDISDNGQYDPITHTITWIVDLAKNEVKTFTVEATVSGYGNISNKVVVGNKTIFKNVDVPEITPKKDVNNTTPNFGENVAYTIVVSNDGISDAKQVVITDTLAKGLKFLGANYNGVYDENTHTVTWTLDIDSGKTVELKVNVTVEDYGVLVNRVTVGDKTSSVDIAVPEIIPDKTANVTDANFGDNVTYTVTVTNDGDVDASQVVIVDQLGNGLKYVSSSDGGVWDEKTNTVTWIVDLAAGKTKTLNVVATVVGYGNVTNSLAVGNKTSKINVNVPEITPNKTVDNKNPNFGDNVTYTIVVSNDGAADAKNVVVKDILAPGFKFIEANYGGVYDELTRTVTWIVDVNAKGHVDLTIKVIVEDYGVLTNNVTVGNKTSSVNITVPEIIPNKTADIENPNFGDEVTYTVNITNVGKSNAVNVAVRDVLGEGLELISADGGVYNPITRTITWTVNLNSGETKSFKVVAKVIGYGNVTNSLVVGNKTSAVDVDVPEIIPSKDADNKYPNFGDSIDYTITVNNIGKADAKHVVVVDRLDNGLKYVSSSHNGVYDEASHTVTWVVDIAAGSSLDLTVTAVADEYGVLTNIVSVGDKSASVDVNVPEIIPNKTADIENPNFGDNVTYTVTVTNDGNADAKAVVVRDVLGKDLKFVSATGTYTFDEATNTITWTVDVDAGKTETFTVVATVINYGNVTNSLVVGNKTFNKNVTVPEITPDKTVDNENPNFGDDLTYTVTVKNEGNGNANDVIIVDALGKGLEYVSSTGNYDNKTNTITWKVDLASGETKTFTVVAKIVGYTDVTNEVTVGNKTAAVTVDIPEIIPAKDVNNTTPNFGDKVEYTITVNNNANKDAKQVVIVDTLGKGLKFINASHNGKYDESTRTITWIIDLGAGESAVFSVNAAVEAYGNINNTVVVGNKSATKNITVPEIIPGKSVDVENPNFGDTVTYTVVVTNNGVVDAKQVVVKDILDKGLKFVKATGEYTFDEDSHTVTWIIDLAKGESQTFYVTAVAEAYGVLINDVTVGDNTASADVVVPEIIPDKTANITNPNFGDKVDYTVTVTNDGMGDANNVVIVDMLGEGLTFVSASDNGVWDPVKRTVTWIVDLAKGESKVFSVIATVSGYGNVTNSLVVGNKTISVNVTVPEIIPDKTVGIENPNFGDNVTYTVKVTNDGIGDANNVVVKDILGEGLTFVDATGNYTFDEATRTVTWIVDLAKGESRTFYVNAIVSGYGNVTNSLVVGNKTTGVNVTVPEINPDKTANITNPNFGDKVDYTVTVTNDGIGDAKDVVVRDVLGEGLTFVDATGNYSFDEATRTVTWIVDLAKGESKVFSVIATVVGYGNVTNSLVVGNKTTGVNVTVPEIIPDKTANISNPNFGDNVNYTVTVTNDGIGDAKDVVVRDVLGEGLKFVSATGNYSFDEATRTVTWIVDLAKGESKVFSVIATVVGYGNVTNSLVVGNKTAGVNVTVPEINPDKTVDNEIPNFGDNVTYTVTVTNDGIGDANNVVITDVLDKGLKFLNATGNFTYDEKTGIITWIVDLAKGETKTFNVNVTVLGYGVLPNTVAVGNKTAVRNITVPEIITVKEVNSSDIHIGDEITYTITVSNPGKINATNVVIRDILPEGLKFINASNGGVYDPVTGIITWILNITANSTVDLTADVCVNKSGNITNTVNVGNKTSNCTIESGDIVDLEIHIVADKSEIYVGDNVVYTVTVINNGPSDAINTIANILIPNALSILSYNATKGTFDITSGNWSIGNLTNGEKVVLTFVAKALNEGNSTVHVNVTSETFEVIMENNYDNVTVKVLKKAAPIGPDKQVHPDGSSSDNECGKSVNLPNTGNPLVMLLLCILSVIFVGSRKRKL

SEQ ID NO: 15 - DNA, 1011 bp, Methanobrevibacter smithii
atgaaacttaagaaaatagttttaatattactattaacattagcactattttccatttcaaatgtaagtgcacaaaatattgatgttaatactacaaacaatattaatccattaaatgaagttttaatagatgaaacaatagccacatctaatgaacttacaaataaatcatctataatctcaaatgacttagagaaatattataaagatgataaaggattctgcgctacattttataatgaaaatggaactccactaactaataaaaatataacttttagtgttaatggagtaagttatattaaaacaactgacaataatggtaccgccaaattaaatattaatttagaatcaggtaactatacaataatatcatacaatccaatcaccaatgaaacaataactaataatataactgtcctatcaagtattaacggtagcgaccttacaaaatattttaaaaatgcaacacaatattcagttacattgtatgataaaactggaaaagctttagttaataaaaccgtacgtttcaatataaatggaatattctacgaacgtaaaaccaatgaaaaaggagtagcccagttaaatattaacctagatcctggaaactatattgtaacggtttacaacctgattacaggtgaagaaaaatccaataacattaatgtagtgtcaagaatacaactgctagatttaaataatgcatcaaatgtaatactgcctgaaggatatgttatacctgtaatgtttattggtaatggaaaggcttatgctcaatgcagagcaacaactcttgacgaaaaaggaaaccccttagctaatcaactagtaacatttaatataaatggaatcatttataaaggcactactgacaaatttggtataatcgatgccattatatatgttaatgcagattggggaaatacataccatatatgtactgcaacattcggagaatcatttgcttcccaaactgttatagttaaacgttttgttatgggttaa

SEQ ID NO: 16 - protein, 336 aa, Methanobrevibacter smithii
MKLKKIVLILLLTLALFSISNVSAQNIDVNTTNNINPLNEVLIDETIATSNELTNKSSIISNDLEKYYKDDKGFCATFYNENGTPLTNKNITFSVNGVSYIKTTDNNGTAKLNINLESGNYTIISYNPITNETITNNITVLSSINGSDLTKYFKNATQYSVTLYDKTGKALVNKTVRFNINGIFYERKTNEKGVAQLNINLDPGNYIVTVYNLITGEEKSNNINVVSRIQLLDLNNASNVILPEGYVIPVMFIGNGKAYAQCRATTLDEKGNPLANQLVTFNINGIIYKGTTDKFGIIDAIIYVNADWGNTYHICTATFGESFASQTVIVKRFVMG

SEQ ID NO: 17 - DNA, 6198 bp, Methanobrevibacter smithii
atgatgattaaaaaaagatttattttagttatcatgattattttaacattttccatgtcattagttaatgctaatgaagatttaaataatgttggatataatgatggcttgcaagttaattccacatattctgaggatgttttaactgctcctgaggatgttggaacatttagtgatttgaattcgaatattcaggcaaatccgaacataagtttggataaggattataaatatgattcttcaagtgatggttctttatcatcaggtatcataattgataaagatacaactgttgatggtgcatcacacataataaatggaagcaattccaaagatgtaaggctgtttgctgttaataaaggtactttaactttaaaaaatgttataataactgatttgaattataatacagatgataaagggttaatttatcaaaatggaggtaatcttgtactggataatgttacttttcaaaagtcaggatataaaagtttaatatgggctgatggaggttcattaactgtaactaattcttattttatcaataatactgcaactaacatattcagagtcagcggatataattctgtttttataaacagtaatgtaataatgaataacaatatttccaatgcattacttgaaaatggattgaatgtaaacactattgacaataatgtttttataaacaatatcaatcatgtaaatattgaatatattaaaagctgtagggataattactggggtacaaatgcagctacctatggttctgttggaatattgtataaatgtgattttacaatagctaaattaagtattgtcggtaataatactatttctggagattctgcttatcagattgtatttaataatacaaaactgcctgtatttaatcttaatgcaattatcgatgaaaaatatgctaccttgaatcagaacagtataactgtcaaaaacggagctgcagaagttagcgttagccctaaagctaatggtgttgcaacgttaagtgttggtaaaaatttaattaaagattccaatactaaaaatattaaaattaatcttgacggaagtattgatgagttatgggtagcaactacaggtagtgatactaacgacggcagtaaagacaaaccattagccagcataactaaagctattgaaatagcaaaatcaggttatactattcatataatggatggggagtattctcaaaaagttttagaaatcaataaaacgctgtcatttattggtgaaggaaataatgttattataagaggaactggaaaccgtgcattttcatgtactgaagacggatgcaatttggaatttataaacattacttttgcaaatttaatatctgaagaaacaagatctgcagcattatatattgaaggtgatggttttcttaaagtaattaattgtacttttaaagatattggagccagatatggtgctatggacataggcactacagcagatgcagaaattaaaaactgtacttttgaaaatgtagtaggaactgcttccagatcagctattattcatgtttctggaagtggggagtatatttttgacggattaactatttcaaattccaaattagctgataatgttgtagaaaatgataagtgtgcatatttaagaggaatattttatattgataatcaaaatgcagttgtaactttaaataatactgttattagaggttcatccggtccaatgcaatcagttgttgagtcaagaagtaaattaaatatcctaaatactgtaattgtgaataatactgttggtatgacttctactggttttggtcagtatcttatttacggatcaagtgcaaatgctaatattaatattaaaaacacggtaatttcaaacaatactgctggagacagctctgagagtgaaattttccagcttacaaatggaaatactcttgatgtatcttattccagcattgttgataataaagttaacaaaatattcaatgttaaatcaggaaatgctgcagttactatggattataactggtggggaaataatactgtttccaatgataaaatcagtaaatggatcataatgaccacaccagataatataactgctcaaaaaggtaaaacaattgatgtgggagtatatttcaatcattatacagatgcaagtggtaaaatttatgatttgtccgtaaatgttccaataactgttaaattcagtacaatcaatggaactttgttaaacaatgttgcatatagtgttaatggaatagctagtgttccatatactgtaaataataatgatacaattactgtaaaatcaggtaaccagacagctactattaaaattatttccaaagtcattgatgctatttgggtatcagctgagggtaatgatgcaaatgacggcagtgaaaactctccggtagctacaatagctaaagcaattgagctggctaaaaattcatctacaatatatgttatggaaggaagttattctcaaggtcagataacaataaataaggaagtatctattacaggtttgggcaaagttattttgaccaataatgcctttatctgcaaagcagataatgtggaatttaataacattgtattttcacaaaatgacggatctgcagttttaaaagtatatgggaataatattaaaatatataactgtacattcagcaatattaatgctgatttgggagtattgtatctttcttcaggttctgttgatattgttaacactgtaataaacaatgtaaacagcagatatttaatttcaatttctaaaaatgctattttaaaaatgtcaaattctgttgttgacggaaataaccttgaaaacagtattttttatcttggagacgggtcttctttaaatgtggattattgtattatcactaacaacagatttgttaattatacaagtgtggaagaagacggcaaatccgaaatttctcttgattataactggtggggaaccaacacacctgcgggaaaggatattaaaaattgggtaataatgaacgctcctgaaagtatttccggtgaaaaaggtgaaactataaatgtcaatgttgatttcaaccattatatgggtgttggtggtaaaattcatacattaacaaaacatattccggaaacagcagttgattttgatggaaatattctaaatactgtcaacggattagttactttttcatatactatagaaaacagcaataaaattgttgtaaagtctgccaatcaaagttcagtcattgatgtcattataaaagaagttaaaagagatgtctgggtatctaaggaaggaaatgatgaaaacaatggtagccaaaccagtcctgtagctacaatcaaaaaagctttagaattagtaagtgacggatattcaatttacatagcgccgggaacttatctggaatatggattggaaataactaagtctgtaaatataattggttcaggcaaagtcattattgatgctgataataatggcaaaataatttctacaacaaataaatctgcagttattaatttagctaatttggaattaactaaagcaaaaagcaactttggatgtgcagtttataatttaggagctgattttacactaaataatataagcatttatgataatgaaataactgatgctttagctaatactatgagtgctatttacaatactggagtaatgacaatcaaaaactctaaaataattcataatattgggcatggattaatatacaacagcaataatcttgcattgattaattcaactctatcaggcaatgatatcgcttcaggcacttcatcatatggaattgtttattcaacgggaggtactgtaaaaatagttgattctgattttgacaataatattgcaagattgggaactgtttatatttccagtggaaaccttatagttgaaaactctatttttgaatctaacagagttactgtaggaaatggaggagctattactttatggtctttaagttctaaagtaaacataactaatgccacatttagagataatatggctgctaaggatggtggagctattttggctaaaggtgatgtaaacatattaaattcaatatttgaaaacaatgctgcaggtaatggatattatggaaatgcaatttataattatggtaatttaaatattcattattcagtattattggaaaatgcttcctccaattatgtaatttataattgtggatacaatccttctgctaatgcacaatacaactggtggggaactaataatgatccttcaaaattggttggtgcaggtaaatgggatgaagatactccatgtgaggatgtagatgtttcaaattggattattatgagtgtaactccaaacattattgaaaatatcacaggaaatcaagttataaaagcaacatttgataaatatcaaggcaacgatggaaaactttatgatttaactaatgctcttcctgaatttaatgttaaattcagtgcgattaatggcacattatcagataatctggctaaagttattaataatgcagctagtgttaattacacaatatctgacaatgacacaattactgtagaatatggtaatgaaatatttaatattaaagttattgtagctaaagaaacctcaattattttaatcaacgttaatgatattgttgtaggtgaaaatgctacaattgatgtatttgtcaataaaaatgcaacaggtaatgtggttgttagtgttaacaataaaaatattactgttaatattaaggatggtaaagccagtttaattgtaagtgacttgcctgtcggcaaatatgacattgtagttaaatatagtggagatgctaattatggagctagtacaaacataacctcatttaatgtaggcaaaatagctaaatatgacattgatgttgatatttccagggttcaaagtggagaaaatgctacaataactgtaagtctgccaaaagatgcaacaggaaatgttacaataatcattggaaataaaaagtataatgcaactgtagttaatggaactgctaaagttatcactggtgtattggataatggtacttatgatgttgttgtgtactattcgggagatgataaatatcttaattctgttaaacaacttaacatgactgttgatgttaataaaaatcttaacttaaaatcagatgacattgtcatgttttataaagatggaacaagatttacagcagttttaactgattataaaggtaatccgatagctaatgaaactttaatatttgtaattaatggtgtaaattatactaaaattactgataataaaggaactgcttcaatggcacttaagttaatgcctggagtatatgaaggattagtactgtttaatggaacttcaaattacaacaatatctctgttaaatgtaatataacaattaaatctactgttattggccatgatattgttaaaatgtttagaaatgcaactcagtattctgcactattcctggacagcaacggtaaggctttagttaatgctactattaagtttaacattaatggtgttttctatactaaatctaccaatggtgaaggtatagctactttaaacatccaattgcttcctaaggaatatattataaccaattataatcttgttactggtgaggaaaactcaaataaagtaactgtcaaatcattacttgttggtaattctgatttggttaaatattacttaaatgaatccggttatactcttaaggtaataggtaaagacggtaaagttgcagctggtcaggaagtaaccttcaacatcaacggagtcttttaccacagagtatctgatgacaatggtattgttagcttaggtattaagttacgtccgggcacctacattgtaacagctgaatacgaaggctgcagagtctccaacagcattacagtattgccaactttaattactaaagagcttgacatgaaatacttagacggcagtaatttcactgcaaaaacacttgacggtcaaggtaaagcattagctaaccaaaatgtatcatttaacgtaaatggtgtattctaccataaaacaacagatgaaaacggtatagcaaacttaaatatccgtttaaatccaggtaaatatatcatcacatctatctggaacgaataccaaataggaaacaacattacaattgcttaa

SEQ ID NO: 18 - protein, 2065 aa, Methanobrevibacter smithii
MMIKKRFILVIMIILTFSMSLVNANEDLNNVGYNDGLQVNSTYSEDVLTAPEDVGTFSDLNSNIQANPNISLDKDYKYDSSSDGSLSSGIIIDKDTTVDGASHIINGSNSKDVRLFAVNKGTLTLKNVIITDLNYNTDDKGLIYQNGGNLVLDNVTFQKSGYKSLIWADGGSLTVTNSYFINNTATNIFRVSGYNSVFINSNVIMNNNISNALLENGLNVNTIDNNVFINNINHVNIEYIKSCRDNYWGTNAATYGSVGILYKCDFTIAKLSIVGNNTISGDSAYQIVFNNTKLPVFNLNAIIDEKYATLNQNSITVKNGAAEVSVSPKANGVATLSVGKNLIKDSNTKNIKINLDGSIDELWVATTGSDTNDGSKDKPLASITKAIEIAKSGYTIHIMDGEYSQKVLEINKTLSFIGEGNNVIIRGTGNRAFSCTEDGCNLEFINITFANLISEETRSAALYIEGDGFLKVINCTFKDIGARYGAMDIGTTADAEIKNCTFENVVGTASRSAIIHVSGSGEYIFDGLTISNSKLADNVVENDKCAYLRGIFYIDNQNAVVTLNNTVIRGSSGPMQSVVESRSKLNILNTVIVNNTVGMTSTGFGQYLIYGSSANANINIKNTVISNNTAGDSSESEIFQLTNGNTLDVSYSSIVDNKVNKIFNVKSGNAAVTMDYNWWGNNTVSNDKISKWIIMTTPDNITAQKGKTIDVGVYFNHYTDASGKIYDLSVNVPITVKFSTINGTLLNNVAYSVNGIASVPYTVNNNDTITVKSGNQTATIKIISKVIDAIWVSAEGNDANDGSENSPVATIAKAIELAKNSSTIYVMEGSYSQGQITINKEVSITGLGKVILTNNAFICKADNVEFNNIVFSQNDGSAVLKVYGNNIKIYNCTFSNINADLGVLYLSSGSVDIVNTVINNVNSRYLISISKNAILKMSNSVVDGNNLENSIFYLGDGSSLNVDYCIITNNRFVNYTSVEEDGKSEISLDYNWWGTNTPAGKDIKNWVIMNAPESISGEKGETINVNVDFNHYMGVGGKIHTLTKHIPETAVDFDGNILNTVNGLVTFSYTIENSNKIVVKSANQSSVIDVIIKEVKRDVWVSKEGNDENNGSQTSPVATIKKALELVSDGYSIYIAPGTYLEYGLEITKSVNIIGSGKVIIDADNNGKIISTTNKSAVINLANLELTKAKSNFGCAVYNLGADFTLNNISIYDNEITDALANTMSAIYNTGVMTIKNSKIIHNIGHGLIYNSNNLALINSTLSGNDIASGTSSYGIVYSTGGTVKIVDSDFDNNIARLGTVYISSGNLIVENSIFESNRVTVGNGGAITLWSLSSKVNITNATFRDNMAAKDGGAILAKGDVNILNSIFENNAAGNGYYGNAIYNYGNLNIHYSVLLENASSNYVIYNCGYNPSANAQYNWWGTNNDPSKLVGAGKWDEDTPCEDVDVSNWIIMSVTPNIIENITGNQVIKATFDKYQGNDGKLYDLTNALPEFNVKFSAINGTLSDNLAKVINNAASVNYTISDNDTITVEYGNEIFNIKVIVAKETSIILINVNDIVVGENATIDVFVNKNATGNVVVSVNNKNITVNIKDGKASLIVSDLPVGKYDIVVKYSGDANYGASTNITSFNVGKIAKYDIDVDISRVQSGENATITVSLPKDATGNVTIIIGNKKYNATVVNGTAKVITGVLDNGTYDVVVYYSGDDKYLNSVKQLNMTVDVNKNLNLKSDDIVMFYKDGTRFTAVLTDYKGNPIANETLIFVINGVNYTKITDNKGTASMALKLMPGVYEGLVLFNGTSNYNNISVKCNITIKSTVIGHDIVKMFRNATQYSALFLDSNGKALVNATIKFNINGVFYTKSTNGEGIATLNIQLLPKEYIITNYNLVTGEENSNKVTVKSLLVGNSDLVKYYLNESGYTLKVIGKDGKVAAGQEVTFNINGVFYHRVSDDNGIVSLGIKLRPGTYIVTAEYEGCRVSNSITVLPTLITKELDMKYLDGSNFTAKTLDGQGKALANQNVSFNVNGVFYHKTTDENGIANLNIRLNPGKYIITSIWNEYQIGNNITIA

SEQ ID NO: 19 - DNA, 1779 bp, Methanobrevibacter smithii
atgattgaaaagaaatataaaaaactgttaaatctttttatcatatgtcttttaggtttaatcctgatttcatctgtctacggagctgatgaattacaatacagtaatgatgacattgttatgggaactactatctatgatgtttcttccgacttgtccaatgatgacattcaatcaatgttggataatgctggacagggagatacatttaattttgttagcaaggaatataaggggatttcattagttgttgacaaaaaagtaaatattatctctaatgttaacagcacggtttatacatctggagagctgtccaataaagctcaggagttaaatattgataaaacttttggattttatttcacaaaaaatagtgcaggcagtgtcttatccggatttaatattgtagctgcatcatcagattatggagttattgttgataattcggacaataccattattagggaaaattctattgttgatgccggaaataatgttttggttaaaaactcaaagaatgtaactttatttggaaatgttttaaataatgccaaggaaaacgggcttcagcttaaaaatgtttccagttgttatgtagccaataacacaatgatgttcaatggcagatcaggaattgagatttatgatattgataattccaatataacttcaaattattgctgcaataatagttttaacggaatttcattatacggcaaatcttttaacaattcctatactcataatttccttaattacaatacaaatggtatttatataaattgtcagtcctggggagatgaaattaaagcaaataccatgattcacaatattcaaaaccctgactgtgaattgggtggttttgaatctggtaatggtcttttattcggggatgcatatagtgctgtagctaataatggagtttatgtgtcatataattcatttgcacataatgaaaacttccaggctaaaaataatcctttacagaatatgattacattaggtccgaatttttttaattctgatgaccctgaaaacacatttgtctgcccgctgttgcttgccaaaatcttaaggttaaatgcaatatcattacctaacggtataggaattcaaatggttgaagatgatactccagtaaaagaagctggaactattgcagttcaggttgaagttgacggtaatatgtatactgcaactttggaaaatggtaaggcagtaattaaagtagatcctaatgttgaccaccaagttgaaattcaggttggcggagaacataatcaggaaattaaaaaaataaagcagaatgtaatttcttataataaaaaagacgattcaggtaatggtgattctggtaaagatgacaacatgggatctgacggcaaaccgtctggttctgatggtgataactcaggtaataaaactggtgacagttctggttcaggagatgcttctggtgagagtggtattgcaaatatcaaaaactctgatgaattttcacaaaatcttggaacaaatagttctgattactatcagaaatatgaatctttaagcggtaaagatgctatggctaaaggagatcaaagtgcagcaaaatcttcagacagcagtggttctccaagtgatgacggttcatcaaaagaaggaaaatcctatgagctagtgtctccaaataaaatatctaaagtaattcaaaatacatcaggagttattattcttgcaataatcgctttattggttttattaataataggatataaacgtaaaaataaaatgtga

SEQ ID NO: 20 - protein, 592 aa, Methanobrevibacter smithii
MIEKKYKKLLNLFIICLLGLILISSVYGADELQYSNDDIVMGTTIYDVSSDLSNDDIQSMLDNAGQGDTFNFVSKEYKGISLVVDKKVNIISNVNSTVYTSGELSNKAQELNIDKTFGFYFTKNSAGSVLSGFNIVAASSDYGVIVDNSDNTIIRENSIVDAGNNVLVKNSKNVTLFGNVLNNAKENGLQLKNVSSCYVANNTMMFNGRSGIEIYDIDNSNITSNYCCNNSFNGISLYGKSFNNSYTHNFLNYNTNGIYINCQSWGDEIKANTMIHNIQNPDCELGGFESGNGLLFGDAYSAVANNGVYVSYNSFAHNENFQAKNNPLQNMITLGPNFFNSDDPENTFVCPLLLAKILRLNAISLPNGIGIQMVEDDTPVKEAGTIAVQVEVDGNMYTATLENGKAVIKVDPNVDHQVEIQVGGEHNQEIKKIKQNVISYNKKDDSGNGDSGKDDNMGSDGKPSGSDGDNSGNKTGDSSGSGDASGESGIANIKNSDEFSQNLGTNSSDYYQKYESLSGKDAMAKGDQSAAKSSDSSGSPSDDGSSKEGKSYELVSPNKISKVIQNTSGVIILAIIALLVLLIIGYKRKNKM

SEQ ID NO: 21 - DNA, 3150 bp, Methanobrevibacter smithii
atgaataagaaaggattgatattatccatattcatatcattaattgttattttatcttcaggctctgtttttgcagaagacataagcaatgcaaattctgatgacagcgcttcaagtccaatagcaaatgatgcagtttatggagaaataacaacatcttcaaattatactgttcatactggatcaaatagttcaactattcaaaacattataaacagtatgcatgacggggatgtattgaattttgaaaaaggtgaatataaagacatttgcatatatattgataaaaatattactgtaaacggtaatggtgcacaattaatcggttatcaaacaccgggaatcaacaatacaaatattccagatattgttaaaaacacaacaaaaactggaggatacggaataagtaattttgcaactgtttatattcttaaaacatcaaatgtaaaacttaacggattaactatgattagtttaaacagcacaacttattccaatgctgtactttacgcttaccaatccaaaaatttagaaataatcaacaataccataatcggatcttcatggggtatttatttacagacttgtgtaaatactacaataaatcagaataccattaaaaatcaggcaacaaccggtattttaaactttggatctgcaaaaagcataataaaaaataataaaattacaaatgctgtaaaccacggtattgacataagacacggaaccggaccaaacgtaacagtattcaacaacaccatcatcggttcaaaagaaggaatataccttatgcattccggaggacatactgtatataacaacacccttattaactgtaccatcagttcaataacctgttatggttcttctaatatttacatatacaataatacaatgttcaaatcaagaatgggagtattattgggttcaggattttcaaatattaccattggtgaaaataattacaacttagctaatttaccttaccctcctacttttgtatattatgttggaatcgcagattctgcatatcaaagtccgcaaagtgtaagtggaacttatagtgacagcagtacttattctccagaatacaccaataaaattgatattgaagctcctaaagatattgtaattgattataatggaatattaaaacctactggaactacctacactgttcctgtcggcactgcaagtgaagatattcaaaaaatgattgattcaatgaaagacggagacacattatcctttgagaaaaacggaatttatgaaaatatctgtatttatgttgataaaaacattaaaatacttggaaataatgcaacattaatcggatatgaaacaaaaggtgttaacaactccaatattcctttaaaagtatggaaaaaaactaatgaaggaggatatggatgcgtttacttctcagtattatatttattcaataccgataatgcagttgtatctgatttgaatatcgttggaaaagctccaggatataatccaaatactgttggtacaactactgacgaatataaaactacttcaatttactcagaatccaataaaaacataacaattaccaattgtgatgtaaaaggatcatcatggggtattttcttacaatataataaaaatgcagttattgcaaataacaacatccatgaccaatacacaacaggattaataaacttcggatcagctaacagtattattgcaaataacacagttaccaatgctgtaaaccacggtattgatgtaagacacggaaccggaccaaacgtaacagtattcaacaacaccatcatcggttcaaaagaaggaatctaccttatgcactcttccggacacaaagtatacaataacactattattaaatgtactttaagctctataactgcatacggttcaggtaatgaagcaatattcaacaacacattaagtggaagcagaataggcataattgttggtggcggatactacaatgtaaccatcggcagcaataattacaatttagacagattaccattccctccatcattcccatactacattgttcaggcagacaataaataccaaactcctgacaaaacacagggaacttactatgactctgcaaaagaaccaaaagcagttattatcgttgatgacattaccatgtattataaaaatggaactaaattacatattactttaaaagacaacaaaggatataatttagcagatactccaattacagttacaataaatggtgtttcttacaataaaaccactgataaaaatggtgctgttgaaatgaatatttatttaaaacctggagtatacactgcaacagttgcttatgcaggaaataaaacaattggagcaaattccgtagatgctaaaattactgttttaccaactataacaggtaacaacataactaaaatgtatcaaaatggaactcatttcttcgctgcatttgtaaacggtcagggaaaagcattggcaaacaccaaagttacatttaatatcaacggtgtattctacaccaagcaaaccaatgataaaggaatagccaatttaaatatcatgttaagacctaatcattatattttaactgcatacaatcctgttaccggtgacgaacaaggatttagcgtagatgtcaaatctttaattgaagctagtgatttaactaaatattacttaaacgcttccagattccaggcaacaatatacaacaaagacggatctttagcagtaaataaagaagtaatctataacatcaacggtgttttctacaccaaaactactgatgaaaacggtgttgcaagcttaggaattagcttaagacctggaaattacattattacaactatagttgacggcttggctatgggtaataacgtaactgttatgccaacattagtaactaaagatttggatatgaaataccttgatggaagtgactttactgcacaaaccttagacggtcaaggaaatccgttagctaaccagaatgtatcatttaacgtgaacggtgtattctatcacaaagtaactgataaagacggtattgcatcattaaagataagattaatgtccggagaatatatcattacttcatactggaacaatttccaaactggaaacacaataaaaatagcataa

SEQ ID NO: 22 - protein, 1049 aa, Methanobrevibacter smithii
MNKKGLILSIFISLIVILSSGSVFAEDISNANSDDSASSPIANDAVYGEITTSSNYTVHTGSNSSTIQNIINSMHDGDVLNFEKGEYKDICIYIDKNITVNGNGAQLIGYQTPGINNTNIPDIVKNTTKTGGYGISNFATVYILKTSNVKLNGLTMISLNSTTYSNAVLYAYQSKNLEIINNTIIGSSWGIYLQTCVNTTINQNTIKNQATTGILNFGSAKSIIKNNKITNAVNHGIDIRHGTGPNVTVFNNTIIGSKEGIYLMHSGGHTVYNNTLINCTISSITCYGSSNIYIYNNTMFKSRMGVLLGSGFSNITIGENNYNLANLPYPPTFVYYVGIADSAYQSPQSVSGTYSDSSTYSPEYTNKIDIEAPKDIVIDYNGILKPTGTTYTVPVGTASEDIQKMIDSMKDGDTLSFEKNGIYENICIYVDKNIKILGNNATLIGYETKGVNNSNIPLKVWKKTNEGGYGCVYFSVLYLFNTDNAVVSDLNIVGKAPGYNPNTVGTTTDEYKTTSIYSESNKNITITNCDVKGSSWGIFLQYNKNAVIANNNIHDQYTTGLINFGSANSIIANNTVTNAVNHGIDVRHGTGPNVTVFNNTIIGSKEGIYLMHSSGHKVYNNTIIKCTLSSITAYGSGNEAIFNNTLSGSRIGIIVGGGYYNVTIGSNNYNLDRLPFPPSFPYYIVQADNKYQTPDKTQGTYYDSAKEPKAVIIVDDITMYYKNGTKLHITLKDNKGYNLADTPITVTINGVSYNKTTDKNGAVEMNIYLKPGVYTATVAYAGNKTIGANSVDAKITVLPTITGNNITKMYQNGTHFFAAFVNGQGKALANTKVTFNINGVFYTKQTNDKGIANLNIMLRPNHYILTAYNPVTGDEQGFSVDVKSLIEASDLTKYYLNASRFQATIYNKDGSLAVNKEVIYNINGVFYTKTTDENGVASLGISLRPGNYIITTIVDGLAMGNNVTVMPTLVTKDLDMKYLDGSDFTAQTLDGQGNPLANQNVSFNVNGVFYHKVTDKDGIASLKIRLMSGEYIITSYWNNFQTGNTIKIA

SEQ ID NO: 23 - DNA, 216 bp, Methanobrevibacter smithii
gtgaaatttattaatataacctttataaacggtgatggtcatgattacggtggtgcaatccacagtgaacacggtggtaaggtatatgcagatacatgtatctttaaagacaataaagcaaatgaaaatggcggagctatttcagtagcaggagaacaattttacaaacttagaaaaaaaatactaacaaaggataattacatccggacctcttga

SEQ ID NO: 24 - protein, 71 aa, Methanobrevibacter smithii
MKFINITFINGDGHDYGGAIHSEHGGKVYADTCIFKDNKANENGGAISVAGEQFYKLRKKILTKDNYIRTS

SEQ ID NO: 25 - DNA, 4245 bp, Methanobrevibacter smithii
atgtttaaaaacaaacagaagcattttcttatttctgtgcttttaatgattttatttttagcagcttcaggtacagcttttagtgctgatttaaatgaaacttcggaagttccggaagtaagtgtatgcaaagataatttggaaaattctcaaaatgacgttgtaggaagtagtgaaataactttaaatgggggtaaattcagtgatattcaaaaagcaattgataatgtaggtgatggtggaacaattcatttaaatgggtattatagtgcccaaaacaatgattctgttatttatgtaaataaaaatatcagaattgcaggtggtttggatactgttttagacggaaaaaatatttcctgtattttttcaattcaaaaaacaggttcaaattgtcagataagtaatttaaaatttgtaaatgggatggatgttcacggaggtgcaatgattattcttggtaaaaatgtagttgttgaaaattcagtttttgaaaataattatgctaaccattcaggaggagcaatttatgtcctttcaatttttaatgatagtggcagatatcctgaagaaggagaaaatttaattataaaaaactgtaattttacaaataactttgcacaggtagctgccggagctattggtgtttatggaaataatactcaggttattggctgtaattttgtgtctaataaagtcaaaccggccactaaccataaatcatatggtggtgcaattcagattggtcgtgatgaatataatctttgttcatatgttgtaaattgtaattttatgggtaatgaagctattgcgcatgatttaaataattctcatggtggtgctggatgtgttagagccggaataacctatcaaaattgtaaatttattaataattctgcagatcagggaggagccttaacttatcatgcatcaggcattattgaggactgtgtattcataaacaactctgcaaaactttatgggggagcattaagtacaggttatatggacatggacatggatttaaaagtaatcaattgtaactttgagcagaataatgctccttatggaggtgctgtgcaattaaaaggtaaaaatattgaaatccaaaattccgtattcaataaaaataccgcaacagtaaatggaggggcaataaatattgtagctaaaacagtcgctattggtggtactgagttcaataaaaacacagcccatgtaaacggtggtgcgatttatattaatggaaataaaacagtcattgaagattcttcatttatggctaatgaggcaattcccgatgttaaaaaattagatgacgggttaggtggagctatttatataaacagttcttcagctaccattaataaaaacatattcaataacaatgtggcgagaaatggaagtgctatttactatgacaaatccggtttgaactgtattatttcagataatgcaatggcagaaaatcaggcatgggtttatgcattgcctatttatgctaaaagcatttattatggtgaagattgtgaagtttcagctactctatttggtggaaataatatagctaaatatgatgatttgtttgtttcaaatgcaatttataataatgcaaaacaagataaaattaaagtaaatggtgaaactcctattttgggagctgtagataatggaaaattatatcaggatagcagagaatacaatatggatattttattaactgtaactcatgaagacgggtctgtagcatttaataaaactttaaaatctgattttaaagggcaggtttcaaatatcttaaaaaatttaaaaccgggcagatataggattagtgcaactcatttcgaggacacttactacaaatatattgcaaatgttacttattttagtgtttttcctaaagcagatcttcaactaaataaaagttccaacttgattaatgccaattatggtgatataataatatggacattaaaaattacaaataatggtcctaatgttggtactggaatcagattaaaagacttaattcctgatggtttaattattttaagctgtgatgatgaaaactataacaaaaaaacaggtattttaaatattgattctcttaacatgggtgaatccaaaataattaatataaaaactttagttaataagaccggaacttttataaatgaagccagtgtatccggaaatgaatatgactgggatttaaaaaacaataatgattcagcaggcattaatgttaatccatcagcagatttggctgttgaaatattggttaatgataccaatcctaaatttaactctttagttaaatggactttgagagttactaataatgggccggatgaagctactggtgttgttgtttgtgatttgctttctaaagatttgatttatctttcaagcaccggaaattatgatgtaaaatcaggattgtggaatattggaactttggaaaggggcaaatccgtttctatagatattgtgactttggttaataaaacaggaaaaatagcaaatgacgcttctgtgtctggaaaggaatatgattggaatttaaccaataactatgataatcagtccattgatgttgaggtatgtgctgacttagctattgaaaaattagtcaatgatactaatcctaaatttaattcattggttgaatggactttaagagttactaataatggtcctgatactgcaacaggcgttgttgtttgtgatattttgcctgaaggattaatcagtattgataaatcatttaatggaagatggaatgttggcaaattgattaataatcaaacaaaagaattaacaataatctgtttagttaataaaacaggaaaacttgtcaatattgctgatattgcaggaaatgaatatgattgtaatttgactaataatattgtaaataaaagtattgaggttgctcaaagtgctgatctttttgttaaaaagtatgtaaacaatacttctccggattttggtgaaataattaaatggtcagttgttgtttcaaataacggtcctgacatagctacaaatgttcaggttaatgatttattggatgacgggctgatatttgtaaagtctagctcaacaaaaggaaattatgatgttaaatcgggtatatggacgattgactcattagcacctgaaactgatgaaactttaaatatttattgtaaagttaataaaatcggaaaaattctaaactttgtcagtgtcaattccacacaatatgattggaatgaatcaaataatcatgataatgaatcggttaatgcagttaaaatagctgatttgtcagttattaaattaatcaacaattcaaatcccaattataatgatttgattaaatggacaataatcgtttcaaataatgggccgaatatggctactggagttatagttaatgatttgcttccaaagtctgttgaatatatttcatcttatctgtctaaaggtttttataatccggtaaatggcatatgggatgtcggtaatttaaatgccggtgaaaagctgcaattgaatattgtatctaaaattgtaaaaacaggagacattacaaatgttgttaatgtcaaaggcaatgaaaaagacagtaatttaactaacaaccattttaaaaaatcagttcatgttaaaccggctgcagatttgtctattgaaaaatcagtatcaaaacaggaagttaacatcaatgatttaattgaatatgtaattgaaattacaaataacggtcctgacagtgctgaaaatattaaggtaagtgaattattaaaccctaatttaaaagtaatttcatttgaaagcaccaaaggcaatttcaataatacaaacaatgttttaactattgattcattagtgaatggtgaaaaagtcaggctgactattaatgctgctgcaaacgcctggggtaaatttgaaaataaagttgctgtttcatctgatacttttgattatgacaaatccaataatcaggacggaacaagtgtttttgtaagtgaaaacacaacagaaaaaatagaagatcctgtaaatgatacttatcttttagtattggctaaaaattcacttcaaaagtctatggtttcaaaattagaaaatttgacacattcgcagtctttaacaagtattgaattgccaaaaacaggtttgccgattgtgctgctgcttttagtttcaatgatatcaatcggatttttacctattaaaatttcaaagaaaagataa

SEQ ID NO: 26 - protein, 1414 aa, Methanobrevibacter smithii
MFKNKQKHFLISVLLMILFLAASGTAFSADLNETSEVPEVSVCKDNLENSQNDVVGSSEITLNGGKFSDIQKAIDNVGDGGTIHLNGYYSAQNNDSVIYVNKNIRIAGGLDTVLDGKNISCIFSIQKTGSNCQISNLKFVNGMDVHGGAMIILGKNVVVENSVFENNYANHSGGAIYVLSIFNDSGRYPEEGENLIIKNCNFTNNFAQVAAGAIGVYGNNTQVIGCNFVSNKVKPATNHKSYGGAIQIGRDEYNLCSYVVNCNFMGNEAIAHDLNNSHGGAGCVRAGITYQNCKFINNSADQGGALTYHASGIIEDCVFINNSAKLYGGALSTGYMDMDMDLKVINCNFEQNNAPYGGAVQLKGKNIEIQNSVFNKNTATVNGGAINIVAKTVAIGGTEFNKNTAHVNGGAIYINGNKTVIEDSSFMANEAIPDVKKLDDGLGGAIYINSSSATINKNIFNNNVARNGSAIYYDKSGLNCIISDNAMAENQAWVYALPIYAKSIYYGEDCEVSATLFGGNNIAKYDDLFVSNAIYNNAKQDKIKVNGETPILGAVDNGKLYQDSREYNMDILLTVTHEDGSVAFNKTLKSDFKGQVSNILKNLKPGRYRISATHFEDTYYKYIANVTYFSVFPKADLQLNKSSNLINANYGDIIIWTLKITNNGPNVGTGIRLKDLIPDGLIILSCDDENYNKKTGILNIDSLNMGESKIINIKTLVNKTGTFINEASVSGNEYDWDLKNNNDSAGINVNPSADLAVEILVNDTNPKFNSLVKWTLRVTNNGPDEATGVVVCDLLSKDLIYLSSTGNYDVKSGLWNIGTLERGKSVSIDIVTLVNKTGKIANDASVSGKEYDWNLTNNYDNQSIDVEVCADLAIEKLVNDTNPKFNSLVEWTLRVTNNGPDTATGVVVCDILPEGLISIDKSFNGRWNVGKLINNQTKELTIICLVNKTGKLVNIADIAGNEYDCNLTNNIVNKSIEVAQSADLFVKKYVNNTSPDFGEIIKWSVVVSNNGPDIATNVQVNDLLDDGLIFVKSSSTKGNYDVKSGIWTIDSLAPETDETLNIYCKVNKIGKILNFVSVNSTQYDWNESNNHDNESVNAVKIADLSVIKLINNSNPNYNDLIKWTIIVSNNGPNMATGVIVNDLLPKSVEYISSYLSKGFYNPVNGIWDVGNLNAGEKLQLNIVSKIVKTGDITNVVNVKGNEKDSNLTNNHFKKSVHVKPAADLSIEKSVSKQEVNINDLIEYVIEITNNGPDSAENIKVSELLNPNLKVISFESTKGNFNNTNNVLTIDSLVNGEKVRLTINAAANAWGKFENKVAVSSDTFDYDKSNNQDGTSVFVSENTTEKIEDPVNDTYLLVLAKNSLQKSMVSKLENLTHSQSLTSIELPKTGLPIVLLLLVSMISIGFLPIKISKKR

SEQ ID NO: 27 - DNA, 1131 bp, Methanobrevibacter smithii
atgaaaaaacaaattgcaattatcatactggctattttattattagccagtgtaattcaggatatatctgcagccactactgtttttctaacgtcagacaacataatgggcacaaatgatgatgcagatatgcttaattccataaaaacctatattgaagaaatcagcaatggaaaaatcaacgtaattgtagacagccaatctccaggacctggagaaggaacaagagctattgaagctgattcaaatgttagtgtagtgtttgctgctgtagatccaggcaatttcttagttttaagcaaatattcaacagccaccacagacaaacagataatctttgtaaatactggagattatgatttagatactgctgaatccttaagaagagcatgggacgataactactcaaaaacaatttttgcaggaatcaataaccccggaacatttcttaatgatggtggaattagctatatccagccattgaaagaatatcatgatgcaggttctgacggcattataaatcaaaataatgatgatgtaaacaaatatattgcccaagaaattgttaataatataaataactacaacaacaccaaacattatgacaataatttagtaataactcataaattagctccttcaaatatggctcatggcagtcaaagccttttagaaagcaacgacaatgaaatgaatggaacttacaactcttattcagctccacaactgttatacttaaccagctcttatttaaatggaaacggattagaaaatcccggagattataaagctccagattctccattgaaatactccattttaactaaagattcctattcaatttatgattatataaaaatgggtggaattgttaaaaattatatggatgaaaacggacaggctccaaattacataaattacgagggtgcatatattagttattacgatttacagtacaattttgctaaaataactgcaaatcatactgacggatcacatatggattttgatagagaatatcattttgataaagttaatgacagtattttattaactatattgccaattgtattgattattttagttattatgtttatttatatgatttttaaaagactattgcacagataa

SEQ ID NO: 28 - protein, 376 aa, Methanobrevibacter smithii
MKKQIAIIILAILLLASVIQDISAATTVFLTSDNIMGTNDDADMLNSIKTYIEEISNGKINVIVDSQSPGPGEGTRAIEADSNVSVVFAAVDPGNFLVLSKYSTATTDKQIIFVNTGDYDLDTAESLRRAWDDNYSKTIFAGINNPGTFLNDGGISYIQPLKEYHDAGSDGIINQNNDDVNKYIAQEIVNNINNYNNTKHYDNNLVITHKLAPSNMAHGSQSLLESNDNEMNGTYNSYSAPQLLYLTSSYLNGNGLENPGDYKAPDSPLKYSILTKDSYSIYDYIKMGGIVKNYMDENGQAPNYINYEGAYISYYDLQYNFAKITANHTDGSHMDFDREYHFDKVNDSILLTILPIVLIILVIMFIYMIFKRLLHR

SEQ ID NO: 29 - DNA, 3081 bp, Methanobrevibacter smithii
atgtttaaagataagtttcttatttttataatattaataattgcactactatcaattagtgtagctagtgctgaagatgtatcatcaaatgctactgacacacaagaaagtgttatattaacacatgatgatttaagtacaaaaacaactacttccacatatgatgaaaacacatctttagagtatgataattcacaaagtgaaaatatacttgaaacatacaaagaggatgtaaatttttctaatgaaaacacactaggtgacgtggaatctagtgatgatactgctttttttaataatgatttaatttcttcaaacgaacctactactcaaaataatataatacataatgaaaaactggttagcaaatcattcactcaattgaaagaggaaatagaattagctagtgatactttaacacttgattccaattataaaatgactgcaaatgaagaaaatagttttaaaaatggaatttccatctttaaaaacattaatattgatggaaatggatttactattgatgcaaataacttaaaaatgattttcaaaataggtaacagattcagtgttagtttatctattactataagtaattgtaatcttgttaattgtgcattttataattatggttctgattctagtttaactgtaaataattgtaattttattaatagtttggattatgcaatttataatgctggttctgattctagtttaagtataagtaattgtaatcttgttaacagcaaaattagtaattctgattctagtttgactgtaaataattgtaattttattaatggttcaattgaaagttctgattctagtttaatcgtacgtaattgtaattttgttaacagccgaatttataatggaggttatgattctagtttaatcgtacgtaattgtagttttattaacaacactgcatacaatggaggttgtgcaatttataattctggttctggtttgactgtaaataattgtagttttattaacaacaccgcaacaaatgattggggaagtgcaatttataattctggttctggtttgactgtaaataattgtagttttattaacaacaccgcaaacaatggagctggtgcaatttataatactgaatctggtttgactgtaagtaattgtagttttattaacaacaccgcaaacaatggagctggtgcaatttataattctggttctggtttgactgtaagtaattgtagttttattaacaacactgcaaacaatggaggtgcaattcatagttcttgttctaattctacaatagtgaactgcaattttattaacaacattgcaaacaatggagctggtgcaattcatagttcttgttctaattccactataagtagctgcaattttattaacaacactgcaaatcatgctggtgcaatttataatgcgggttctgattctacaatgatgaactgtaattttattaacaatattgcaaacaatggaggtgcaattcatagttcttgttctaattctacaatagtgaactgtaattttattaacaacactgcaaacaatggaggtgcaattcataattttggttctattactgtaagtaattctaaatttaaagataataatgcaagtaaaggtgttgctatttataatgatgtttattctcaaattagtataggtactattaacttaaataacaatacgtattctggaattaataacggtaaaacatatatttacaatataggcactattctcacacccgtaacaattactgttttagaaaacaaaactgtcaattgcagatataacaatgaaataacattatttgccactattactactagttttgatggagctagtgttgctggcggaacattaaacttcattataggtagaagcactatatcaactgtagcaacaagcaatgataatggaacttataattatacttacaaggtacctttcagaaatatttctgaaatcattagtgcatcttacaataatgccagtaatgcatatgtttatagtggtattttagattctagaaatgttactagtgtgaatataatagttaataatgttgtaatgatttacaaggatgggtcacgcttatatgcaactttactggatgctaaaggcaaccccctaattaatactgcactttcatttacaattaatggtgcaacatacaataaaactacagacttaaaaggtattgcttcaatagctcttaacttagaacatggaatatacaatgcagttatttcttatgctggaaacaaaatgtataaaccatctagtgtaaacagcactgtaactattaaatcatcaattactggtcaaaacattgttaaaatgtatcaaaacgatacaagattctatgctaaattcattgacagtactggaaaagcactaactaacaccgaagttaaatttaacattcatggtgttttctacaccaaaaaaactgataaagatggtgtagctgatatgggtattatgttaagacctggaacttacattttaactgcttacaacccagtaactggtgaagaaaaaggatttaacataactataaggtcattaattgtgcaaaacgatttaaccaaatactactcaaatgcttccaaattccaagcaactatctacaacaaagatggatctttagcagtgggtaaaaatataacattcaatatcaacggtgtattctatactaaaacaactgattcaaatggtgttgcaagcttaggaattgctttgagacccgaaaactatactattacaacaatgtatgatggattagacattggaaacaaagtcaaggtcataccaactttagtaactaaagatttaaacatgaaacacttagacggtagcaacttcaccgctttaactttagacggtcaaggaaaaccattggctaaccaaaatatatcatttaatgtaaatggtgtattctatcacaaagttaccaataaagatggtatagcaagcttaggaatcagactaatgagtggagaatacattataacttcttattggaataacttccaaacaggtaacacaataaaaatcaacccttaa

SEQ ID NO: 30 - protein, 1026 aa, Methanobrevibacter smithii
MFKDKFLIFIILIIALLSISVASAEDVSSNATDTQESVILTHDDLSTKTTTSTYDENTSLEYDNSQSENILETYKEDVNFSNENTLGDVESSDDTAFFNNDLISSNEPTTQNNIIHNEKLVSKSFTQLKEEIELASDTLTLDSNYKMTANEENSFKNGISIFKNINIDGNGFTIDANNLKMIFKIGNRFSVSLSITISNCNLVNCAFYNYGSDSSLTVNNCNFINSLDYAIYNAGSDSSLSISNCNLVNSKISNSDSSLTVNNCNFINGSIESSDSSLIVRNCNFVNSRIYNGGYDSSLIVRNCSFINNTAYNGGCAIYNSGSGLTVNNCSFINNTATNDWGSAIYNSGSGLTVNNCSFINNTANNGAGAIYNTESGLTVSNCSFINNTANNGAGAIYNSGSGLTVSNCSFINNTANNGGAIHSSCSNSTIVNCNFINNIANNGAGAIHSSCSNSTISSCNFINNTANHAGAIYNAGSDSTMMNCNFINNIANNGGAIHSSCSNSTIVNCNFINNTANNGGAIHNFGSITVSNSKFKDNNASKGVAIYNDVYSQISIGTINLNNNTYSGINNGKTYIYNIGTILTPVTITVLENKTVNCRYNNEITLFATITTSFDGASVAGGTLNFIIGRSTISTVATSNDNGTYNYTYKVPFRNISEIISASYNNASNAYVYSGILDSRNVTSVNIIVNNVVMIYKDGSRLYATLLDAKGNPLINTALSFTINGATYNKTTDLKGIASIALNLEHGIYNAVISYAGNKMYKPSSVNSTVTIKSSITGQNIVKMYQNDTRFYAKFIDSTGKALTNTEVKFNIHGVFYTKKTDKDGVADMGIMLRPGTYILTAYNPVTGEEKGFNITIRSLIVQNDLTKYYSNASKFQATIYNKDGSLAVGKNITFNINGVFYTKTTDSNGVASLGIALRPENYTITTMYDGLDIGNKVKVIPTLVTKDLNMKHLDGSNFTALTLDGQGKPLANQNISFNVNGVFYHKVTNKDGIASLGIRLMSGEYIITSYWNNFQTGNTIKINP

SEQ ID NO: 31 - DNA, 789 bp, Methanobrevibacter smithii
atgaaaaaaggaatattaaaaaaacttacaattgttgactatattataatcattgcagtaatatgtgctgttgtttttgcatttatccatattacaactgatgattcaaatgacacaaaaacatcatcatatgactcatctacaatgaataaaatagttgaaaattatttgaaattatacttagaaggaaatgtagtggaaacaactgtcagcggatataatgcaagtactgggaaagctgttgaattacatggaaacatatcatggattgatgatgacaaaggatcaaatgtcaaagtactgattaattcaaatggaaaagaatatctggcaggattatacaaagacattcctaatgcagacatttatatagactccatttctcttgaaacaaatggaaagaaatttaacaatttaacagaagtgacagtcaaaccggaaaatattacttcattaaatgaattaatttcaggaatcggcaacactacaaattatgaaattacaacagcaattgcagttgatgaattaactacaattaattatcaggatttgacaaacagtctttattcccatgataaaagaatatcaataaaaggatcaaatgcaggtatatacaaccaattaattataacccgagcaacaggtgatgaaataaatcttgcagacggtattttaggaaactttaatggtgcaacaagcccaataaccattagaatttatgactgcagtgaacaggacttaaaaactattgaaaataactataatgttaccaatatcaaaacattttaa

SEQ ID NO: 32 - protein, 262 aa, Methanobrevibacter smithii
MKKGILKKLTIVDYIIIIAVICAVVFAFIHITTDDSNDTKTSSYDSSTMNKIVENYLKLYLEGNVVETTVSGYNASTGKAVELHGNISWIDDDKGSNVKVLINSNGKEYLAGLYKDIPNADIYIDSISLETNGKKFNNLTEVTVKPENITSLNELISGIGNTTNYEITTAIAVDELTTINYQDLTNSLYSHDKRISIKGSNAGIYNQLIITRATGDEINLADGILGNFNGATSPITIRIYDCSEQDLKTIENNYNVTNIKTF

SEQ ID NO: 33 - DNA, 11055 bp, Methanobrevibacter smithii
atggataagaaaattttattaatctgtctcatagctattgtggcattttcaatatcttgtgtaagtgcagcagatagtaatgagatagttatgaattcatctgatgcaattggtattagtgaagacatatctgtcgatgatgttgtatttgctaatcagataagttcagaggattctcaggtagttggcgattctccatctggtgaggtgtgggtagcaactactggtagtgatgataatgatggtagtcaagctagtcctgtagctagtgtcagcaaagctgtagacttagctcaaagtggatctactattcatattaaagaaggaacttataatcagggaaaaataagtcttaataaaactttatcttttgttggtgaaggtaatgttatattaagtagtaatggtgcaaatgtatttgaatgtcttgaaaatgactgtactttagaattcactaatcttgttttcacaggggtttcatctgctagtggtagttcctgtggtttaagagtaggtggtaatggaaatcttaaagtaattaattgtacttttacagatattagtgctaaatttggtgcaatgcagttatacacaacaggtgttgcagatattattaattctacaataaaagatgtgacctgtggagtaactaggggatctattgtttatatttcaggcactggtgaatataattttgataatttgtctattattaatcctaaattatctgattctgtaactggtgctgcggtacatttaagaaatgtgttttatttagataacaaagatgcaactgtaactttaactaattctcgtataactggagctagtggacctatgatgtctcttatagaaaataagggtactttaactatttccaatactgtaatttccaataatgtaattggaaaaacagaaagtggaattaatggtcaatatttgttatatttgggctatgctaattttgtaactgcattaaatatgactaactgtataattgaaaacaatacttttggtaatgcagatactagtgcattagcttatatttttaaaaattccattgttaatttaacttattcttctattatgaataatggattcagtaaaaatttaaatattgcatctggagttactccaactgttaatttagattacaactggtggggaactaatacttatactggtgataatgtaaataaatgggtagttatgagtactcctgaaactactattgatgctgaaagtggtaaagctattgatgtaagtgttaactttaatcattatactgatgcttctggtagtattcaagatttagctcagtctatttctggaattaatgttgactttagtgctgttagtggtactttaagtaaaaataatgtagctagtgtagatggtatagctactgtaacatacactactacaactaatgataaaatcactgctaaatcaggtagtcaaagtttaactattgatgttgttgcaaaacaagcagcagctgatatttgggtagcaactacaggtagtgatgataatgatggtagtcaagctaatcctgtagctactattgcaaaagctattgaacttgctggagatggttatactattcatattgctgatggtaattatgtaaatgataaaactttaagcatttctaaaagtttaactttagaaggtagtgctaatacagtaattgatggtaatgcttcaaaaattatggaagtaactgctgatgcaactgttgttttaactaatttgtctttcacaaatggtaatgatgctcttgtaggtgctatttcaaatgaaggtaagttaaccatttctaactctaacttttattcaaataaggccactggtaattctggaactataattactaataaaaataaattaaatattaataattctaaattttatcaaaattctgcaggcaaaggtgttgtaaacaatcaaaatgatacattattagttattgataattctgagttttataataatgatatgacttcattttctaattcttatggtatagtttatacaacttcagcaaatgcaactatctccaatactgtatttagaaataatgctgttaaatatggtggagctatttatgcaactaaatcatctgatgcaactataggtattgttaatataattaattctacatttgaaagtaatagtgcaaatactggtcagggaggagcattatttgtttctggtggagaatgtattataaaagaatctatgtttattaataacaaagctaatcctggaaaattcactggtggtcagggaggagcaatatacacttcattaaacggtaatgtcagtgttacagattctgttttcaaaaacaatcaggctaaattaggtgctgcattatacttaaatggtggcagtaattcaaccatttcatattcagttttattagataatgttgctgaaggagactatgcaatatctaatgctgaatctgcatctggtgttgctacagttaattacaactggtggggaactaattctcctaagaatttagtgccttcaacagtaacattaaacaattgggtaatcatgagtgcagatccaactactgtaacagatgctgaaataggtgatgtaaaaacaatatctgttaatttcaacaaatattcaagttttgatactataaatggcttgtcaaaacctcttcctgctattgatgtagaatttagtgctgttaatggtactttagcaagtaatcttgtttctactgttaatggtgttgctgctgtttcatacactgtaaatggcaatgatcagattgctgttaaatcaggtagtcaaactttaactattgaagttgttgcaaaacttccagtaactgatgtttgggtatcatctactggtagtgatgcaaatgatggtagtcaggatagtcctgtagctactattgcaaaagcaattgaattagttgctgaaggttacactattcatgtaggtgaaggtacttatattgctaattctttaacaatagctaaatcatttgcaatgattggttcaggaaaagttatcattgatggtaatgcttctaaaatcatgaatataaatgagaatacaattgttaacttcactaatgttgcatttaccaatgcattaaataattatggtggagttatgcaaagtaaaggaactgtaaacttaaataatgtaagcatttacaaaaacactcaaaaatcaggaagtactcctactgtaagttcaatatataatactggtgtaatgactattgttaattcaaatatttatgaaaatgacggttacggattaatatttaattcaggtaatcttgatattatcaatacatctatttccagtaataatgttggtaaaggtactacttatgcatttttatatattgatggtggtgctgtaaatgtaattaactctacactatctgataatactgctagattaggtggtatttggcttaataaaggaactttaaatgttaataatgcaacatttgaaaataatgtagttactgtaggaaatggtggagcaattcacattgaatctgattcaagtactgcaaccattaaagattccaaattcattggaaacaaagctaataaagatggtggagctatttataataaaggtaccttaaatattgaaacttccatttttgatgctaatgcagcttccaatggaaatactggttattatggtgatgatatttacaattcaggtattttaactttacattactctgcattacttggaaaaggaactaataaattaatttacaatgaaggccgtgaaccaagtgctaatgctcaatataactggtggggaactaacagcaatccttcaactttagttggtgctggtttagattattatgatgaaccatgtgatgatgttgatgtttctaactgggttgtcatgagtgttgatccaacaagtattgaaaaggtcatagttggaaatgaaaaaattttaacagttaacttcaatcattataatgcaaatggcgtaattaaagaattagctaaatctattccatctattaatgttaattttgaagctgttaatggaactttatccagtgatgttgcagctactgataatggggtagctagtgtaacttacactgtaaaaggtaatgatcaaattactgttaaatcaggcagtcaaactttaaccgttccagttaccactaaagaattaaccaatattgtaactaatgaaacattctttgattactttggtgatgacggaatgttattgggagatattacttttgatactttgatattcaaaggtgaattctctaatcttggtgtaaatgttgtttatgttccaagagctattgttattaatggtgataatgcagtattaagaaatattgcaataatgtgtgaacaaggaactactttaaataatttaactttaaatgctactgattatgttgctgatactgatggtgtacttatatatgctatcggtagtgatgtcacagtgaataatattactattgattataatgctactgatggttctaataatgcaattgcagtttatgctagtggtgcagataactttaaattagtaaacagtacaattacttttactggaaacaatgttgacggtaaagtatttgctcagggtataaaaatagcaaaaagtaacaatgctgttgttgattcaaatataattactacttcatgtccgttagtggatgttgagtacagccattggggaagtattgacactgatttggtatttgcaattggtgtggaaaaatcagaaaatgttaaaattattaataatatagtggataattctgcttggactaaaggaaataatgctaatttccctactttcgatgcatttattgctcatactgctaataatttattaattaaaaacaatactatttctcatactgatttaataactctgaaaggaaattcaagttatatttatgcacttgatttttatgaatccaacagtgtaattgttgaagataatcgtgtattacttaatactactggtggtaaagagggtgccggcgctgcttatgctgtacaggttacaggtccttataataattttgtagttaaaggaaataatttaaccacagtatctaacggtcctaatttaggagtgtactcacaaaattattatggtgctactgaaattactgttgagaataattggattaatgtaactggttttgctggacctgccgaatttgctttggtttcaggtatggaattccaggatactgtagctaaagcatataataacactatctatgttcaaaatgtaaacgaatataatgatgacaataatattgcaggaattacttatgtacaatcaaccagcggaagccaccaatttgatattcagaataataccatttattctgaaggaaaatatgcagtattaattaaatctgctaaagattcacaaataattggaaacacattgtatgcacatgagttaaacggtgatgatgcagcaatatttaaatcaggaactaataatgtagttaaaaataattatcctatgtctaccgatattataattgatgtaaataatgcatggattggtgaagaagcagttattggcataactcttaattctgctgcaactggtactgcaaacatcatggttggtggtaaaacttacactgttaatttaactgatggtaaagctactttaaaagtatctgatttgcctgctggtgaaaatactgttaaagtggattatgatggtgatggcaaatttaaatcttcaaccaacagcacaacatttaaagtatttgatggtattgtaactaatgaaacattctttgattactttattaacggtactttagcagattatgttcctgaaggtgcaactttagacttcagaggtaaattctatagtcatgatgatgttaaatttgatttagctattaataaaccaattaatatgatttcaactactggtgatgcatttattgatttaaacactactgcaggtagtttacttggagaaaatccaggttcatgctttacaatcaataatggaggttccggatccaatgtgtctggtattatattccataacactcaggtttggatttatgatgctcataatgtagttttaaataatattagtgtaattgttgaaaataaaagagttggttctggtgttggaactactgctatacgtcacggatctactaatgtaactcttaagaacagctacatttacaccagcaataatggtgggtcaagcagtattgttttaactcacgttcaaaattgtactgttgaaaataacactattgtcggtgaaggtaatgtaggtaatttactttacttgaatacctttaacgatgcaggctgtgatttaagtaatgattacaataaaatcatcaataataaaataacaggtccaagtcctgctgcggcattttgttacggtattggaattaacggtaataataatttaattgcaggaaatgtaattaattatgctggtaatggtattgttcctgcatggggtgctactcctaacaacaacacttactgtgacaatgttttaattggaggagctagtatgagtgttgcagctagttctattgcttacaacaacactgtttcaggtactttaactatcggatcaggttcagttgcttacaataacactgcaaaagctatatctgtcagttctaattctgttgtatctaatagtagtgcaactgcagctttaacagttcaggcaggagctaaagtagctaatgtaactgctgcttctttatctgtaagcggtaaaaatgcagttattgaaaatgtatctattagtggtgttggaactattaaatccagtgcaactaacactacattaattaactccacatttggaggtatgcttactgttcaaagtgctaaaaacacaattaaatataataatattgtacttgctactggtgatgcagcaattcttgcaactggtggagataatgtaattaccaataactatttaattgctggagataaattaggtgataatgcagttaattctactgttgaaacaaacattgtaaaagacaaccttcctggaggaattgtcaatgttacaattactgcaaaagatgtatttgaaggcactgatgtaataattgatgtgactgttgattcattatctaatttaactgaaaaattcatgcttaaaatcaataataaagaatatgttctttcatttactgattcaaaagctaatgtaactatttctgatttgactgcaggtaaatatgatattgctgtaacttatggtgatgaaacatacactttaattaatgctacttctgatgtttcagtttacggaaatgttgtaactaatgaaacattctttatctactttgatgaagacggattattaagagaagaagttcctttcgatgaattaatatttaaaggagaattctcagatattgtaaatcttatttctattacaactcctcttaaaataaccagcgataatgcagtattaagaaacatagcatttgctgtgctttcagataatgtagtattaaacggattaactttaatctctaatgtttcatgtgctgataatggtggagctctcatattggtagctggaaataatgtaaatgtttctaatatgaacattagctatattattaaagaaagtgtagatgctgttgcaattaatgcaaatggtgtttcaaacttaaatgttgttaacagcaatattttctttgaatcatgtcctaaagatgatacattaactgcatgcgttattaatatagatggtgtttctaattcattcattaatggaaataatattactgctgttttaccttacctatttgcatctaattatgatatgaaatacttcatgatgggtgtaaacactgtaaatccaattaggatgagggaatgtaataatgtaacattttccaaaaacaatgtaaacactactgcaaatgatggaagtgccagcttccctactttacaatgtatgtttattgtcggatctaatgactgtgtaattgatggaaataatttctcaatgattgatacacttattcctgctggtacaagcaattacctctatggaattaacattggatacaataaaaacttaatgatttccaataatgactttaaaatgtctactgctggtggtaaagatgctgcaggtactgcatatgcaatacaaggcgtagaatgtgaagtatctatgattggaaacaacattacaagtataagtaacggtccaaacttaggtatttactttgcaagtatgactggcggaacatctgaactttacattgcaaataacttaattaatgtaacaggtttagcttctgctagtggtagctgggctttagtttcaggtattgaagtgcaaaacggtaatgcaaaaatatacaacaacacaatctacacttacaacgtgggcgattatagtcctgaaaattatatgtatggtatcagctatgctcaatacatgtacggagaccgttcatttgatatacgtgacaacagaatatacgttgacggccattatgcagtttcatttattaatgtagacggatctaatgtaactggcaacttattgattactcgtaatctgggtggagatgctgctgttgaaattaaagcaggtaaaaacaatgtagttgaaaacaactatcctagaagttctgatttaatattcaacattacttctgaagaacctggaaaaattttaattgatgtgactattgataaaaaagctactggaaacattgctgttattgtagacggtgacaaatatgatgtagctattgttaatggttctgctaaattaactttaagtgatttgcctgctggagtatattatattgaagctaaatataatggaaattccattgtaactgaaagttataattccactaaattcactattgatttaattgattcttcaattgctgttgaagctaaaaacattaaatgcggtgaagaagcagtaattactgcaactgttactaatggtgcaacaggaactgttacattcttcgtaaatggtaaaacctatgttgtagatattacagatagtgtagctactttaaaaatagctgatttaactactggtgattgtcctgtatttgcttactataatggtgataaatactataaaacttcatacaattcaacaacattcaatgtagctaaattagcttctacaactactgtcaatgttagtgatattaaagttggtgaggatgctgttattagtattgctgttcctgaaataacttctggagtagttagtgttactgttggtgatgcaatttataatgttgctgttgttgatggtaaaggatctttaactttatctggtttggctagtggttcttatgatgttgttgctaaatttaatggtgatgacaaatatttagctagtgaagatagtgctaaattcaatgtaactaaattagcttctacaattgatattgctgttgataatattaaagttggtgaggatgctgttattagtattgctgttcctgaaataacttctggagtagttagtgttactgttggtgatgcaatttataatgttgctgttgttgatggtaaaggatctttaactttatctggtttggctagtggttcttatgatgttgttgctaaatttaatggtgatgacaaatatttagctagtgaagatagtgctaaattcaatgtaactaaattagcttctacaattgatattgctgttgataatattaaagttggtgaaaatgctgtaattagtgttgcattgcctgaagatgcaactggtgaggtaattataagtgttaatggtaaaaattacactgttatgactaaatatggaatggctagtgtaactatttctgatttggctaatggtacttacagtgtagatgtgttctataatggtgatgacatttatgcacctattaaaaactctactgcttttactgtttccaaagtgtctgattataatatgactgttgatattgcagatattgttaaaggtgaaaatgctacaataactgttagtgttcctgaagacggaaccggaagtgtaattgtaacaataaacggaacagattataacggaacagttgttaacggtactgctaaagttatcattcctggtttggatgaaggaagctacaaagttgtaacattctacactggagataacaaatatgattccatggttgttaacggaactataacagttaataaaaacaccagaaccactttaataatggatgatgttgttaaatacttcggaggttctcaaaaacttattgctaaacttgttgacggatttggaaatccaatagttaatgcaactgtttacttcacaataaatggcagggtttatgctaaaatcactgatgaaaacggtatggcttcaatgggtattggattagttcctaatgaatacaaagtaagtgcagtatttaacggaactgatgattatgatatggcaactgctgatgctactgtattagttaaaagcacaattttaggaaatgacactacattatacttccttaatggaacatcatatgtggctaaattcttagacagtgatggaaatgcattggcaaatactactgttaaatttaatattaatggtgtgttctacactcgtgtaactgatgaaaacggtatggctagtttaaatattagactagatcctaattcatatattattactgcttacaatccagaaactggtgaacaaagagctaatgaggtaactgttttaccaagaatcattgctgaggatatctccatgaagtatcttgacggcagttcatttaacgcaacacttgttgacggtcaaggtaaagcagtaacaggtgtaaacataacatttaatgtaaacggtgtattctatcataaaacaaccgacgcaaacggtgtagctagattaaacatcagattaatgcctggcgattacatcataacatcaacatatgacaaatgctgggcatcaaataaaataacaatttcagcttaa

SEQ ID NO: 34 - protein, 3684 aa, Methanobrevibacter smithii
MDKKILLICLIAIVAFSISCVSAADSNEIVMNSSDAIGISEDISVDDVVFANQISSEDSQVVGDSPSGEVWVATTGSDDNDGSQASPVASVSKAVDLAQSGSTIHIKEGTYNQGKISLNKTLSFVGEGNVILSSNGANVFECLENDCTLEFTNLVFTGVSSASGSSCGLRVGGNGNLKVINCTFTDISAKFGAMQLYTTGVADIINSTIKDVTCGVTRGSIVYISGTGEYNFDNLSIINPKLSDSVTGAAVHLRNVFYLDNKDATVTLTNSRITGASGPMMSLIENKGTLTISNTVISNNVIGKTESGINGQYLLYLGYANFVTALNMTNCIIENNTFGNADTSALAYIFKNSIVNLTYSSIMNNGFSKNLNIASGVTPTVNLDYNWWGTNTYTGDNVNKWVVMSTPETTIDAESGKAIDVSVNFNHYTDASGSIQDLAQSISGINVDFSAVSGTLSKNNVASVDGIATVTYTTTTNDKITAKSGSQSLTIDVVAKQAAADIWVATTGSDDNDGSQANPVATIAKAIELAGDGYTIHIADGNYVNDKTLSISKSLTLEGSANTVIDGNASKIMEVTADATVVLTNLSFTNGNDALVGAISNEGKLTISNSNFYSNKATGNSGTIITNKNKLNINNSKFYQNSAGKGVVNNQNDTLLVIDNSEFYNNDMTSFSNSYGIVYTTSANATISNTVFRNNAVKYGGAIYATKSSDATIGIVNIINSTFESNSANTGQGGALFVSGGECIIKESMFINNKANPGKFTGGQGGAIYTSLNGNVSVTDSVFKNNQAKLGAALYLNGGSNSTISYSVLLDNVAEGDYAISNAESASGVATVNYNWWGTNSPKNLVPSTVTLNNWVIMSADPTTVTDAEIGDVKTISVNFNKYSSFDTINGLSKPLPAIDVEFSAVNGTLASNLVSTVNGVAAVSYTVNGNDQIAVKSGSQTLTIEVVAKLPVTDVWVSSTGSDANDGSQDSPVATIAKAIELVAEGYTIHVGEGTYIANSLTIAKSFAMIGSGKVIIDGNASKIMNINENTIVNFTNVAFTNALNNYGGVMQSKGTVNLNNVSIYKNTQKSGSTPTVSSIYNTGVMTIVNSNIYENDGYGLIFNSGNLDIINTSISSNNVGKGTTYAFLYIDGGAVNVINSTLSDNTARLGGIWLNKGTLNVNNATFENNVVTVGNGGAIHIESDSSTATIKDSKFIGNKANKDGGAIYNKGTLNIETSIFDANAASNGNTGYYGDDIYNSGILTLHYSALLGKGTNKLIYNEGREPSANAQYNWWGTNSNPSTLVGAGLDYYDEPCDDVDVSNWVVMSVDPTSIEKVIVGNEKILTVNFNHYNANGVIKELAKSIPSINVNFEAVNGTLSSDVAATDNGVASVTYTVKGNDQITVKSGSQTLTVPVTTKELTNIVTNETFFDYFGDDGMLLGDITFDTLIFKGEFSNLGVNVVYVPRAIVINGDNAVLRNIAIMCEQGTTLNNLTLNATDYVADTDGVLIYAIGSDVTVNNITIDYNATDGSNNAIAVYASGADNFKLVNSTITFTGNNVDGKVFAQGIKIAKSNNAVVDSNIITTSCPLVDVEYSHWGSIDTDLVFAIGVEKSENVKIINNIVDNSAWTKGNNANFPTFDAFIAHTANNLLIKNNTISHTDLITLKGNSSYIYALDFYESNSVIVEDNRVLLNTTGGKEGAGAAYAVQVTGPYNNFVVKGNNLTTVSNGPNLGVYSQNYYGATEITVENNWINVTGFAGPAEFALVSGMEFQDTVAKAYNNTIYVQNVNEYNDDNNIAGITYVQSTSGSHQFDIQNNTIYSEGKYAVLIKSAKDSQIIGNTLYAHELNGDDAAIFKSGTNNVVKNNYPMSTDIIIDVNNAWIGEEAVIGITLNSAATGTANIMVGGKTYTVNLTDGKATLKVSDLPAGENTVKVDYDGDGKFKSSTNSTTFKVFDGIVTNETFFDYFINGTLADYVPEGATLDFRGKFYSHDDVKFDLAINKPINMISTTGDAFIDLNTTAGSLLGENPGSCFTINNGGSGSNVSGIIFHNTQVWIYDAHNVVLNNISVIVENKRVGSGVGTTAIRHGSTNVTLKNSYIYTSNNGGSSSIVLTHVQNCTVENNTIVGEGNVGNLLYLNTFNDAGCDLSNDYNKIINNKITGPSPAAAFCYGIGINGNNNLIAGNVINYAGNGIVPAWGATPNNNTYCDNVLIGGASMSVAASSIAYNNTVSGTLTIGSGSVAYNNTAKAISVSSNSVVSNSSATAALTVQAGAKVANVTAASLSVSGKNAVIENVSISGVGTIKSSATNTTLINSTFGGMLTVQSAKNTIKYNNIVLATGDAAILATGGDNVITNNYLIAGDKLGDNAVNSTVETNIVKDNLPGGIVNVTITAKDVFEGTDVIIDVTVDSLSNLTEKFMLKINNKEYVLSFTDSKANVTISDLTAGKYDIAVTYGDETYTLINATSDVSVYGNVVTNETFFIYFDEDGLLREEVPFDELIFKGEFSDIVNLISITTPLKITSDNAVLRNIAFAVLSDNVVLNGLTLISNVSCADNGGALILVAGNNVNVSNMNISYIIKESVDAVAINANGVSNLNVVNSNIFFESCPKDDTLTACVINIDGVSNSFINGNNITAVLPYLFASNYDMKYFMMGVNTVNPIRMRECNNVTFSKNNVNTTANDGSASFPTLQCMFIVGSNDCVIDGNNFSMIDTLIPAGTSNYLYGINIGYNKNLMISNNDFKMSTAGGKDAAGTAYAIQGVECEVSMIGNNITSISNGPNLGIYFASMTGGTSELYIANNLINVTGLASASGSWALVSGIEVQNGNAKIYNNTIYTYNVGDYSPENYMYGISYAQYMYGDRSFDIRDNRIYVDGHYAVSFINVDGSNVTGNLLITRNLGGDAAVEIKAGKNNVVENNYPRSSDLIFNITSEEPGKILIDVTIDKKATGNIAVIVDGDKYDVAIVNGSAKLTLSDLPAGVYYIEAKYNGNSIVTESYNSTKFTIDLIDSSIAVEAKNIKCGEEAVITATVTNGATGTVTFFVNGKTYVVDITDSVATLKIADLTTGDCPVFAYYNGDKYYKTSYNSTTFNVAKLASTTTVNVSDIKVGEDAVISIAVPEITSGVVSVTVGDAIYNVAVVDGKGSLTLSGLASGSYDVVAKFNGDDKYLASEDSAKFNVTKLASTIDIAVDNIKVGEDAVISIAVPEITSGVVSVTVGDAIYNVAVVDGKGSLTLSGLASGSYDVVAKFNGDDKYLASEDSAKFNVTKLASTIDIAVDNIKVGENAVISVALPEDATGEVIISVNGKNYTVMTKYGMASVTISDLANGTYSVDVFYNGDDIYAPIKNSTAFTVSKVSDYNMTVDIADIVKGENATITVSVPEDGTGSVIVTINGTDYNGTVVNGTAKVIIPGLDEGSYKVVTFYTGDNKYDSMVVNGTITVNKNTRTTLIMDDVVKYFGGSQKLIAKLVDGFGNPIVNATVYFTINGRVYAKITDENGMASMGIGLVPNEYKVSAVFNGTDDYDMATADATVLVKSTILGNDTTLYFLNGTSYVAKFLDSDGNALANTTVKFNINGVFYTRVTDENGMASLNIRLDPNSYIITAYNPETGEQRANEVTVLPRIIAEDISMKYLDGSSFNATLVDGQGKAVTGVNITFNVNGVFYHKTTDANGVARLNIRLMPGDYIITSTYDKCWASNKITISA

SEQ ID NO: 35 - DNA, 2268 bp, Methanobrevibacter smithii
atgttatttttcgtgattatgggatgcgtttctgcaaatgatttatcaacattaggtgaaaatactactgtgcctaatattataattgttggtgatgcaccagaagttccagatgtgcctgacattccagatattccggattttccagttgatcctgataatccggacattgatgatcaaaatgattctgatacagttaatttgaccatatttaacatcgatgaatattttgttgacggtactttgggggttgagcattctaataccaaatttgtattaactcaaaactttgataatttaggtcttttaaaaattgaagcaaataatgtaactattttaggtaataattttactttgcaaaatgttgcatttttgattaatggtaaagatgttaccttagctaatttcacattagttaatgattttgatttcaaagatgctgatggtgcggcaattcttacattggccaataatacgcatatacgtgattgtgttataaattataatgttcctcgtgatagtgaaggttacggcatttctgcagttggaagaagaattgctccaattagtggtttggaagttattaactgtataatcaactttgaaggccataattataaggcaaatacctataattatgctttaaaagtaagtaactgtcctaatgcattaattgcaaataacagtatttatactcagcttccgttgagggatgttaatttcggagcagttggagctgatttaaattctaattatgtggcaagtgtaggtattgagtacagtaataatttaacatttatcggaaatattgttgcaagtattgttaataaaaggccaggaagtcctttccctacattggacggtataattattgccgattcaaatgattgtcttgttaaaaacaatactttgtatatggaagatttcttaactttcccaggtcttaataattatctttatggtattgatgtatggcgtgtaaatagtttgacattagattctaataatatagctattttaactactggcggaatgttatctgccggtactgcataccctatacaaattaccggaccttctaagaagataaatataactaataatgatttgtattcaatatctaacgggccaaacataggaatctattcacaaaattattatggtgatacacaattgtatattgctcataataagattaacgtgacaggattggcaggtaatgatagctgggcacttgttgcaggtatagaagttcaggattctaacgatactattattaataatacaattgaagttcatagtgttgcggaagttaaggacaatgacaatatgtacggtataagttattctcaatcaactaaaggtaaccatacatttgtaattaaaaataatacagttactagtgatgcaaaatatgcgatttctctaataagtgctgagaattcggttattgttgataatttattaatatctactaggaaagatgcgaaagccagttatgatgcattcaatacgaaaggaaaattttataatacttcatattataataatcgtgtagtcaatgcatttgattattatgcggaaatttacaatcatgttgacggaggttctgaatttaattatacgactcctaccaatgtgaacaatttgacaaataaggttgatggttcaaaaataaaaccatggttccctgatttccctaatagaaatcctttacttcctaaacctggtgacggaagtagtgttattgtaactcctgacgatggtgatgataaaaatccaaatgttccagatagacctgacggtgatgcaggttatgtggatgtccctgatttatctggtgatgatggaggatcaaaaaatccgtctaacggcactagtagtacagataaaaattctaacaaattaggtgtaagtttacttgatgctttgattaatttcttgaattcaaatacagacactggagactcaagatccaattcatatggtggaactgttcgtacaaatagcagtacttcatctagtgacagtccaagccttgacggaaatccatctccagcaagtagcacaaaatcctcttcaggatcaaatgcaaaaagtgctggaagttctgcaggtgatgactccaaatctgtaaaagcatatgaaattgataaaaatataatgaaaagtaatccgaatacaattattgcttctattatattaattataatcgttgctttgttaatatttgttggatacaaacgcagaaaattaaacgaagaataa

SEQ ID NO: 36 - protein, 755 aa, Methanobrevibacter smithii
MLFFVIMGCVSANDLSTLGENTTVPNIIIVGDAPEVPDVPDIPDIPDFPVDPDNPDIDDQNDSDTVNLTIFNIDEYFVDGTLGVEHSNTKFVLTQNFDNLGLLKIEANNVTILGNNFTLQNVAFLINGKDVTLANFTLVNDFDFKDADGAAILTLANNTHIRDCVINYNVPRDSEGYGISAVGRRIAPISGLEVINCIINFEGHNYKANTYNYALKVSNCPNALIANNSIYTQLPLRDVNFGAVGADLNSNYVASVGIEYSNNLTFIGNIVASIVNKRPGSPFPTLDGIIIADSNDCLVKNNTLYMEDFLTFPGLNNYLYGIDVWRVNSLTLDSNNIAILTTGGMLSAGTAYPIQITGPSKKINITNNDLYSISNGPNIGIYSQNYYGDTQLYIAHNKINVTGLAGNDSWALVAGIEVQDSNDTIINNTIEVHSVAEVKDNDNMYGISYSQSTKGNHTFVIKNNTVTSDAKYAISLISAENSVIVDNLLISTRKDAKASYDAFNTKGKFYNTSYYNNRVVNAFDYYAEIYNHVDGGSEFNYTTPTNVNNLTNKVDGSKIKPWFPDFPNRNPLLPKPGDGSSVIVTPDDGDDKNPNVPDRPDGDAGYVDVPDLSGDDGGSKNPSNGTSSTDKNSNKLGVSLLDALINFLNSNTDTGDSRSNSYGGTVRTNSSTSSSDSPSLDGNPSPASSTKSSSGSNAKSAGSSAGDDSKSVKAYEIDKNIMKSNPNTIIASIILIIIVALLIFVGYKRRKLNEE

SEQ ID NO: 37 - DNA, 5193 bp, Methanobrevibacter smithii
ttgaaacatggtaggttgttaactgctgtattaatattgattttatgcagtttgctgggtttggctagtgtcagtgctgccgatttaactaatgatacacttgatgattttcagggtgatcctgtaattggtgaaattaataataaccatgcagttggcgaggaaaataacggcgattgtctttatgttagtgtaaatggtaatagctatgctaatgctacttcatggggcagtgccactaactcattggattgggcaatatatttagctaaagacaatactacgatttacatagataatggaacatacagcggttctgcaaattcaaaaattaatatagccaagtctgtaaatattgtaggttctgttaacactgtatttgacggattaaacaaaaactatttttttacaatttccgatggtgtaactgtcagtattagcaatataacttttattaatgcatttaaaaaagcggatctttattatgaccagaaaagcgtatatggtgcagtgttggatgttaaaaaagcaacagtctttattagcaattgtgcatttaacaataaccgtattgaacatacttcatctataagtaaggacaattacggagcagccattagtaattctggtaatatgacaattattaattccagattcaacagtaattcaatgacttctgaagcacgtaattctgcgcatggaagtgatgtttacaataatggtactttaaaaatctttgattccacatttaagggttcatatgttggagactttgcattcggaggatcaatttctaataatggtaatttaacattaaccagagttgtaatgtctggtagtagtactgctcagcaggttaagggagcagttctttttaattccggaaattgtactatgataaattctactattaaggattcttttgtaactagagctttattcaatactctttatggtgttatttataatgaaggtagtttaaaagctgttggatgtatttttgcaaataatggaggtataaaagatagtgctattcctgtttataaaggtactgtcaatatttacactgtaggggaaatagacataagctattctgcatttttaaataacaagccgctggctgaaagttatgctgatttctttgcagacggtggtgaaaacatttgtctggacaataattggtggggatccaataaaaagccggtgaacaaatccaatgttgataaagtaaattcctggctgatgttggtagggtctccggaatacagtgctcttaatataaacgagtcaactgatatttcagctatttggaaatcaagcagtggaaagcctgttgatattagtttattccctatttttgatgtttcatttaatacatgggttaatggaactgcacagacaataaccaaaaaactggataatggaagcgctgttataagctataactggactcaaaagaaaggaagttatgaagtttcaatcagtttaaggaattttactcaaaaagtattggttgatgtaggtaaacttgtatcaaatatgactgtaagtgtcaatgacatcaattatactgaaactcttgttgttgatgtagccgtaaatggcatagattcaattttgcctgaaggaaatgtttcacttataattggtggaaaaacatacactgaaaacttagtcaatggtaaggcaacttttaacatacctgatttgcttgccggaaatcatacattaaatcttgtttatatgggaaatgacgaatatttcagatcatttgttcataaaactgtcacagtaaataaatgccctattaatttaaacatttcaattcctgaaattaatgttggggaaattgcaaaggtcaatatacatacatctcctaaaggagttcaaatttatgcatatttaagtattaacggtaaacgtgtacagatgattgttataaataaggaggatattcaggttacaattagaaattatggtggagctggcgtgtacaacattacaattgaaacatggggcagtgaacttgatgaacagctttatgaaatggcttcagtcagcggattattgaaagtaaataaatatgatacaaatctgagtgttaatgccagtgatgttaaagcaggtgaaaatgcaacaataactattaaaataaaccctaaagatgttaaaggggaagcaacacttattataaatggtgttgaaagcaaaatatttttaaaagatgaaataactgagattacactccataatttaaccggcggaaaatatgatgtaactgtcatttatcctggtgacaataaatatgccggttcaacggcatcaacgtcatttgtggttttaaaagaaagctgcaatttgactgttgatgttattcaaaatgatgaccttacaggtattgtcaatataaaaacaaacccgggtaattgtactggtcttattggagtttatgtaaataatgtactttatcaggcaaagctggttaatggaatagctaatgtttctgttaactttacaaaaggaactaattatgtttatgtatactatcctggagatagctattatgatgatgcgtcatggaatacaacggtaaatatatctgcaaaatgtatcttaaccggtgaggacattataatggttgaagaagacggatccaaatacacagttaaagtaactgatctggacggaaatccctttacttatgtgattgttttaattgaagttaacggcacaacatataaggtaactacaaataatgcaggtaaggcttcacttcctctcaatctgacttccggaaattacacaatatctgctacatatgattatacaacagtatacaacaccattacagtcaaacctcttgattttaatttaacagtagctgatataggatatggtgaaaatgcaattatcaatgctaatttcaatgctttaattaacggaactgttacatttataattaaaaatcatttaaacaaaactgttgatgtaatctcaggaaatgccagatatagtttgagcggattaaaactgggtacttatactgtagaagctgtttataattccaaactatcaaaaacagctacattcacagtatccaaaggcactccaaaattagatgtggacattaaggatgttctcgcaggacaggatgaagtaattacagtaactcttccaaatgatgcaacaggagaaattacatttattgtagatggaacaacatatacaaaaacacttaataatggaatagctgcaattgcaattcctgatttgactttaggaaatcatagtttaaaagtaatgtattctggagatgctaattacaacagcagtactgccgacatgacattcaatattaaaaattcactttcagaaactgtcattgatgtaaacaatactgtttatggtgaaaatataactgtactggccagtgtaacctctggagcaacgggtaatgttacttttatccttggaaatttaactaaaacagtagaaattataaacggcaaagcaatagctacttttaataagttaaatgcaggaacttatagtgttagggcagattatttgggaaattctgtttattccaaatcatctgatgaaaaatcatttgatgtagccaaagctaattcaaatattgaaattatcactggtgaaatagaatttaataaaaatgttaggatttgggctgttgtaaatgatgatgcaactggaaatgttactttcaggattttgggattatattcaccaagaaataagactattgttggaggcaatgcgtcatggcttatttcacctttaaatagtggttcatatgttgttgtggctacatataatggtgataataactatttaagctcaaatacaactatggttatttcagtaaatcaaactgtaagtgttttgaaggtaaatgttgaagtatatgaagatgacatggtagttactgcaattcttaaaactctggacggtcagctgattacaggcaatgtaactttggaaattaacactaaattttataaaatcgttgtagttgacggaattggtgtaagaagcattgaaaaaccttcagttggtaaatacacatattctgcaacttataaaggaactgataaaatttctcgagctgtagatactggtgtttttgaagtcctgcctgttgattacaatgttattttaaatgctcctgatgttaaaatgatttatcatgacggcaccagatttgtagcaaccctaacagacaaacagggaaatcctattggtggtgctgcaattgaaataattatcaatggaagaagttatgataagataactgatgagaaaggtagtgtgagtttgggtttgaatctggacagtggaatatattctgttgttgttaaatttaaaggattattaaactatactccaataaccaagcatgcaaatgtcactattgaaccaactgttaaaggattggatgttgttaaaatgtttagaaacagcacacaatattatgcaatatttactgattctcatggtaatttccttaaaaacaaaaacgttcagttcaatatcaatggtgtcttttacaccaaaaccaccaacgataagggaatagctatgatgggcattaacttaaatcctggcaagtatgttataactgtgataaatcttgttacaggtgagcaatcaagcaatattattactgtaaactcattgattgttcaaaaggatttaaccaagtactatttaaatgcttcaagatttgaagcaaccatttataacaaggatgggagcttggctgtaaataaggaagtgacttttaacatcaatggtgtgttttatcacaggacaactgacagtaatggtgttgcaagtctgggaatatctctaaggcctggagaatatatcattacaactatgtttgacggattggttattggaaacaaagtcagtgtattgcctacattggttactaaaaacttgaacatgaaatacctggacggaagcagctttactgcacagacattagacggtcagggaaaaccactggctaaccaaaacgtatcatttaatgtaaacggagtattttactataaagtcacagacaataacggtatggccaaattaaacattagattgatgcatggagaatacatcataacttcctgctggaacaatttccaaacaggaaacacaatacgaatattttaa

SEQ ID NO: 38 - protein, 1729 aa, Methanobrevibacter smithii
MKHGRLLTAVLILILCSLLGLASVSAADLTNDTLDDFQGDPVIGEINNNHAVGEENNGDCLYVSVNGNSYANATSWGSATNSLDWAIYLAKDNTTIYIDNGTYSGSANSKINIAKSVNIVGSVNTVFDGLNKNYFFTISDGVTVSISNITFINAFKKADLYYDQKSVYGAVLDVKKATVFISNCAFNNNRIEHTSSISKDNYGAAISNSGNMTIINSRFNSNSMTSEARNSAHGSDVYNNGTLKIFDSTFKGSYVGDFAFGGSISNNGNLTLTRVVMSGSSTAQQVKGAVLFNSGNCTMINSTIKDSFVTRALFNTLYGVIYNEGSLKAVGCIFANNGGIKDSAIPVYKGTVNIYTVGEIDISYSAFLNNKPLAESYADFFADGGENICLDNNWWGSNKKPVNKSNVDKVNSWLMLVGSPEYSALNINESTDISAIWKSSSGKPVDISLFPIFDVSFNTWVNGTAQTITKKLDNGSAVISYNWTQKKGSYEVSISLRNFTQKVLVDVGKLVSNMTVSVNDINYTETLVVDVAVNGIDSILPEGNVSLIIGGKTYTENLVNGKATFNIPDLLAGNHTLNLVYMGNDEYFRSFVHKTVTVNKCPINLNISIPEINVGEIAKVNIHTSPKGVQIYAYLSINGKRVQMIVINKEDIQVTIRNYGGAGVYNITIETWGSELDEQLYEMASVSGLLKVNKYDTNLSVNASDVKAGENATITIKINPKDVKGEATLIINGVESKIFLKDEITEITLHNLTGGKYDVTVIYPGDNKYAGSTASTSFVVLKESCNLTVDVIQNDDLTGIVNIKTNPGNCTGLIGVYVNNVLYQAKLVNGIANVSVNFTKGTNYVYVYYPGDSYYDASWNTTVNISAKCILTGEDIIMVEEDGSKYTVKVTDLDGNPFTYVIVLIEVNGTTYKVTTNNAGKASLPLNLTSGNYTISATYDYTTVYNTITVKPLDFNLTVADIGYGENAIINANFNALINGTVTFIIKNHLNKTVDVISGNARYSLSGLKLGTYTVEAVYNSKLSKTATFTVSKGTPKLDVDIKDVLAGQDEVITVTLPNDATGEITFIVDGTTYTKTLNNGIAAIAIPDLTLGNHSLKVMYSGDANYNSSTADMTFNIKNSLSETVIDVNNTVYGENITVLASVTSGATGNVTFILGNLTKTVEIINGKAIATFNKLNAGTYSVRADYLGNSVYSKSSDEKSFDVAKANSNIEIITGEIEFNKNVRIWAVVNDDATGNVTFRILGLYSPRNKTIVGGNASWLISPLNSGSYVVVATYNGDNNYLSSNTTMVISVNQTVSVLKVNVEVYEDDMVVTAILKTLDGQLITGNVTLEINTKFYKIVVVDGIGVRSIEKPSVGKYTYSATYKGTDKISRAVDTGVFEVLPVDYNVILNAPDVKMIYHDGTRFVATLTDKQGNPIGGAAIEIIINGRSYDKITDEKGSVSLGLNLDSGIYSVVVKFKGLLNYTPITKHANVTIEPTVKGLDVVKMFRNSTQYYAIFTDSHGNFLKNKNVQFNINGVFYTKTTNDKGIAMMGINLNPGKYVITVINLVTGEQSSNIITVNSLIVQKDLTKYYLNASRFEATIYNKDGSLAVNKEVTFNINGVFYHRTTDSNGVASLGISLRPGEYIITTMFDGLVIGNKVSVLPTLVTKNLNMKYLDGSSFTAQTLDGQGKPLANQNVSFNVNGVFYYKVTDNNGMAKLNIRLMHGEYIITSCWNNFQTGNTIRIF

SEQ ID NO: 39 - DNA, 1863 bp, Methanobrevibacter smithii
atgaaaaatttaatatttaaaaaacagttgataatcctaatatcagtttttatattggtagcaggaatttctgctgtaagtgcaaatgaaaatactactgatttacatcaaagtatggaagcatatgataataacgttattaacactgatttagaagttgatgataataatattatccaaccaaataacactgatgttaaatccaatgttagtattgatataaacaactttgaaatgtattataaaaatggtactaaattaaccggaaaattattagataacaatagcaacccaataattaaccaaactgttagtattaccattaatggcgtaagctataataaaattactgatggcaatggtacatttggaatgaatatcaatttagatccgaatgtttataatttcacagtagcatataacggttcagacatttataattccgcatttaaaaatgctaaagttacagttttatctgttattaaatcaaatgatttagtcaagtattataaaaatgaatctcagttttatgctactttattagacgaaaaaggaaatccaatagctaacaacacagcagtccaattcaatgtaaacggtgtattctacaccagatataccaatgaaaacggtactgccaagttaaacatcaaactttatccagaacattatatcattacaattatacaccctaaaggtgaaaaaaaaggatataatattactgttttacctacaattatttcaaaggatttggttaagtattataaaaatgaatctcaattttatgctactttcttaaatggacaaggaaaaccaatagctaacaatactgaagttcactttaatgtaaacggtgttttctacaccagctataccaatgaaaacggaactgctaagttaaatattaacctttatcctggaaattatattataacttccatgcaccctgacggattccaaatgggagttaatatttttgtaaataaaactttaatcacatatgatattagtcagccatgtaataaaacaggtactgcaacttttaatgcagaagttttagacggacaaggcagacctctcagtaatgcttctgtaacattccttattgcaggtaaagttttaaccaaaattactgatgaaaaaggtattgcttctattaatattaaagcatatccaggagtttataccattacaacaacttacaatggttactctgtaggaaaaactttagagatttataacaatgaaacaggatttaaaagatataatttaggttcaaatgaaaatggtactgtccatttatacaaatcaattggtaataccagttcaaatgtaagaatagcttatattattggtgttcatataaccgaaaatgctgttcacaaagcattatttgatgaattaaccaataaatccagcgaattaaattactgttatgatatttataaaataaatgtagttccaatcggcaaacctattgatgacattaacaggatgagagggcagcttttaggacgtgattatgtagttcctgaagctataaaaaacaattattctcttgtagttgatgtacactccaatcagggaggagcatatgtcattactaactttgtttttgctcctgcacaggataatgtatccaaagctatagctaccaaaataatcaatgataatccaggtttacaggaatacttcccggcttcacaaacaagcccggcatatgtaactcttcctatacaaaggtcaggtacacctaccatactttatgaaacatataaatacgaagattataataatgtaactgtaccgtatgttgatttattgattgaatcagtcgataccatatttgattatatatcataa

SEQ ID NO: 40 - protein, 620 aa, Methanobrevibacter smithii
MKNLIFKKQLIILISVFILVAGISAVSANENTTDLHQSMEAYDNNVINTDLEVDDNNIIQPNNTDVKSNVSIDINNFEMYYKNGTKLTGKLLDNNSNPIINQTVSITINGVSYNKITDGNGTFGMNINLDPNVYNFTVAYNGSDIYNSAFKNAKVTVLSVIKSNDLVKYYKNESQFYATLLDEKGNPIANNTAVQFNVNGVFYTRYTNENGTAKLNIKLYPEHYIITIIHPKGEKKGYNITVLPTIISKDLVKYYKNESQFYATFLNGQGKPIANNTEVHFNVNGVFYTSYTNENGTAKLNINLYPGNYIITSMHPDGFQMGVNIFVNKTLITYDISQPCNKTGTATFNAEVLDGQGRPLSNASVTFLIAGKVLTKITDEKGIASINIKAYPGVYTITTTYNGYSVGKTLEIYNNETGFKRYNLGSNENGTVHLYKSIGNTSSNVRIAYIIGVHITENAVHKALFDELTNKSSELNYCYDIYKINVVPIGKPIDDINRMRGQLLGRDYVVPEAIKNNYSLVVDVHSNQGGAYVITNFVFAPAQDNVSKAIATKIINDNPGLQEYFPASQTSPAYVTLPIQRSGTPTILYETYKYEDYNNVTVPYVDLLIESVDTIFDYIS

SEQ ID NO: 41 - DNA, 2856 bp, Methanobrevibacter smithii
atgaattttaagtatttaatatttttatgtttgatgtttattgtttcaatgggtgcagtaagtgctgcagatgatgttaacagcactttcaatgcaaatattgatgtaaatgatgtgcctgttgattcagttattattgataatcctatttatacaaataatgcaaaggaatacacaataacaaatgacaattatggaaattattttgataatgaaactggtgatgcattagaagaggctccttttaataatggagatattttaaaaattgataatgtgtctgataaatattttgtaataaataaaaatttaactatcatgcctgcgggagataatattaccttgaaaaatgtagggtttaattttgttcctggaagtgaaggttctgttgtaaatgggttaactattgacaataatgttggcaaatggagtaataatgatgctatacaattagtacctattttaattcagcatgctaaagatataaccgttattaattcttatattcattcatcagcagcttctgttccagcaattaacggggcgatttatatgatgaatgcttcttattgtaatatcaggaacaataccatttctcaatcttcaggtaaaactccaatacagattgtttcatcaagttataataatatgactgataataaaatatattctaaagcttcaaatgttatttttataggaatgggtttcaatacttatagtgtagctggtattagtgaattcaacatatttaaaaacaacatcataaatggaactactggtataagttctgcggggtgttatgcaattaagttgcagggcaattccaagcagaataaactcgttggtcagaatacttttataggtaatgtcatatctaatgcatttgtaggtgttaatgctgtggcagatgttggggaagtagttataattaataacacttttgttaatattaaaacaggaattgatgtgtccactaatgttgttggtgggggtatagttgttaaaggcaactctataaatgtatctaatattggtatttcacttaaaaaaggatatggtataattgaaaataacacaattgatgctgttggagatggaattcaacttgctgcaaatgcaaaaaatattactgtagacaataatgtgattatttccggtaaaaattatgcagtatctgttgcaggtactacaggtaccaatacatccataactaacaattatattatttctaaagactattatggaaatggtgcggttacttcaaaaagcaacgatacaataatagaaaacaacactcctgctggtgcttcaatcaatgcagatatatctgctatcataaataaaaatgctacaatcaaaattgatgttttaccatttgatgctaatggtaatgtaactattaagtttaatggaaaatctgaaactattaatttcaacgcttcacaaactattgtttatgatttgggagttttaggtgttggagattatgaggttactgtaatttataatggcaatgctaaatataatgcaaccaacattactaaaactttttcaattggcaaaatttctgattataatgtaactttaaacactactgatgttgtcgccggtgaaaattcaactcttgttataattttacctgaagatgcaactggtgttgtcaatgttactgttggaaaagattcatacaaagcaaatgtaactgatggagtagctagtgtaaaaatcaactctttaattgctggtgattataaagtaaatgttacatattcaggagataaaacttatgaagtttcaaataatgtatttaatttagctgttaatccaatgaaagttaatttaaatatttctgatgttgtaatgttctatcgtgatggaacaagaatggcagctattttaactgatattaaaggcaatcctatagctaatgcaacattatactttacaattaacggtcaaacatataagaaaactactgatgctaatggaactgcttctttaggcattaatttagtatcaaaaatatataatgcaactgtttcttataatggttcagatatttatgataagctctctaaaaacattactgtaactgtcaatccaactattttagctaatgatactgttttaatgtataaggacggcactgagtttgttgcaaaattcttggataaaaccggaaaagcattagctaatacttcagttaaattcaacatcaatggggtgttctacactaaaactactgatgctgagggtattgctaaattaggtattaggttgaggcctggagcttatattttaactgcttataatgatataactggtgaagaaaaaggatttgatgtaactgtcaaatctttaattgcagctaatgatttaactaaatattatatgaatgcatcaagatttgaagcaactatctacaataaagatggaactttagctatcaataaaaatgtaactttcaatattaacggtgtattctatcacaaaactactgatgaaaatggtgtagctagtttaggtattgctttaagacctggaaattacattattactactattgttgatgatttggctatgggtaataatgtaaatgtattgccgactttagtaacaagtgatctctctatgaaataccttgacggcagcagttttactgctcaagcattagacggtcaaggcaatccattagctaatcagaatgtatcatttaatgtaaatggtgtattctatcacaaagtaactgataaagatggtattgcatcattgaatataaggttaatggctggacaatatattattacttcatattggaacagtttccaagtgggaaacactataaaaatagcttaa

SEQ ID NO: 42 - protein, 951 aa, Methanobrevibacter smithii
MNFKYLIFLCLMFIVSMGAVSAADDVNSTFNANIDVNDVPVDSVIIDNPIYTNNAKEYTITNDNYGNYFDNETGDALEEAPFNNGDILKIDNVSDKYFVINKNLTIMPAGDNITLKNVGFNFVPGSEGSVVNGLTIDNNVGKWSNNDAIQLVPILIQHAKDITVINSYIHSSAASVPAINGAIYMMNASYCNIRNNTISQSSGKTPIQIVSSSYNNMTDNKIYSKASNVIFIGMGFNTYSVAGISEFNIFKNNIINGTTGISSAGCYAIKLQGNSKQNKLVGQNTFIGNVISNAFVGVNAVADVGEVVIINNTFVNIKTGIDVSTNVVGGGIVVKGNSINVSNIGISLKKGYGIIENNTIDAVGDGIQLAANAKNITVDNNVIISGKNYAVSVAGTTGTNTSITNNYIISKDYYGNGAVTSKSNDTIIENNTPAGASINADISAIINKNATIKIDVLPFDANGNVTIKFNGKSETINFNASQTIVYDLGVLGVGDYEVTVIYNGNAKYNATNITKTFSIGKISDYNVTLNTTDVVAGENSTLVIILPEDATGVVNVTVGKDSYKANVTDGVASVKINSLIAGDYKVNVTYSGDKTYEVSNNVFNLAVNPMKVNLNISDVVMFYRDGTRMAAILTDIKGNPIANATLYFTINGQTYKKTTDANGTASLGINLVSKIYNATVSYNGSDIYDKLSKNITVTVNPTILANDTVLMYKDGTEFVAKFLDKTGKALANTSVKFNINGVFYTKTTDAEGIAKLGIRLRPGAYILTAYNDITGEEKGFDVTVKSLIAANDLTKYYMNASRFEATIYNKDGTLAINKNVTFNINGVFYHKTTDENGVASLGIALRPGNYIITTIVDDLAMGNNVNVLPTLVTSDLSMKYLDGSSFTAQALDGQGNPLANQNVSFNVNGVFYHKVTDKDGIASLNIRLMAGQYIITSYWNSFQVGNTIKIA

SEQ ID NO: 43 - DNA, 2391 bp, Methanobrevibacter smithii
ttgaattttaaattaaagattttgtttttaggattgttactggttttatgtgtcaattcagtttctgctgccgattctttgaataatatgactttaaatgatgatgttttattggatgggtctgattatgttgttggtgaaactattttgattgatcatgatgtttcaattgctgctaaggatcattccactatttcagcggaaaataataatgttattttcaatgtttcttcaaatgcaaagttaactttatctaatctgaatctgactaatgccaatggagtaaaaggtggagctatttacaataacggtgttttggtattaaataattgtacttttgtgaataataaagcaacttttgggggagctatttataataatggaacaatgattttaaataattgtacttttgaatttaatattgcttcagttagtggtggagctatatataatcttcaggatgatttaactattcatgattcaactttcattggaaattatgcaaaaattaaaaatggtattttacagggaggagcaatagctaattatgctaataatttaactgttgacaactgttcttttgttaaaaatcatctgtttaatactaactggtataaaaacggaaaaatgtatggtggagctatttataattccggaaacaatttaatagttaaaaattctaaatttaatggaaattatatttatggatatactgacagcatgaataaacatgtggatttatctgataaatatggtggggctgtttactcaaatgcagatatttcagcttttttaaataatgaatttgattctaatgaaatatattccatgttgtcttcatatgttactaaaaaagtatacttaagcaataaaggtatagccagtgctattgcagcatataataaagtaattataattaacaacaccttttcaaataattctgcagcctgcccgcctataaatattgacaatggtgaaagatgcattatattaaacaatacttttattaataataatgcaagatctcttgcacagtccataaagatggatggaaataatacttttattgcaggcaatactttttatagggatgaaaatgctactgataaaggttattttgaaaatcctgattactgggaagtatatgaaattttaattgatggaggtgtaaataatacaatttcttataattattttgaaaattccaatggaattcattatctcaattcatttggtgaggataaaactgccaatttaactattagcaataatgtgtttaacaattccaagaagtctgtttttgtagaacatataaataatgtggatataacttcaaatgtatttataaattcaaattatgctattagtacttacactggaagacatattaatattaaaaataattatttctatggtggaggttcagataacagctcccgtaaggggtatattgatataaactctcatttcacagatatttccggaaatgtttttagaaaaataggtactgaagacagttttggccctgttatttatattaaggtaagagataatattacaattgcaggtaatgcattcattgaaaatactgttgctcatggtaatggaattatttcttcattgtttggaggattttattatattgatggtataactgatgttgatggtcctttaggtaatgttgaagttaatcataattattttgcaaacaattcccttaatgacggtgcaatatttgagtcaagagcttcaaaaattaatattgaacataatatcattgaaaataatgatggtttaataattttagctaatgaaacatactacaaaacccaatatatgaattttactaaaaatcagattaaagattttactggcgatataatggattatagctacttctataattctaaaaattttgatggttcagctaatgaagaatatactggggacagcacctcatttttagataaaatatttgattttgttaagaatttatgggatgagtatgtcaaaggtaaaaattctgttaaagatccaaataatgtagatactaataaaaacacaaccagttcaggttctgatgttgctgataatactgatgattcaagagatgatattaaaagtaattctacagattccagtggagattccgatgttggtgatagtttagataaatcacattattctgctaagaatagccttagtgaatctgaatcaaatgtgggtgatagttcatccggtttgagtagtgattcttcttcacctgaagttcatgaacttgaaaaatccaatgtttctaaagatattgctgatgataattatctgatttggattgttttggttattgtagttatatttgcattattggctatcggatataataaaagataa

SEQ ID NO: 44 - protein, 796 aa, Methanobrevibacter smithii
MNFKLKILFLGLLLVLCVNSVSAADSLNNMTLNDDVLLDGSDYVVGETILIDHDVSIAAKDHSTISAENNNVIFNVSSNAKLTLSNLNLTNANGVKGGAIYNNGVLVLNNCTFVNNKATFGGAIYNNGTMILNNCTFEFNIASVSGGAIYNLQDDLTIHDSTFIGNYAKIKNGILQGGAIANYANNLTVDNCSFVKNHLFNTNWYKNGKMYGGAIYNSGNNLIVKNSKFNGNYIYGYTDSMNKHVDLSDKYGGAVYSNADISAFLNNEFDSNEIYSMLSSYVTKKVYLSNKGIASAIAAYNKVIIINNTFSNNSAACPPINIDNGERCIILNNTFINNNARSLAQSIKMDGNNTFIAGNTFYRDENATDKGYFENPDYWEVYEILIDGGVNNTISYNYFENSNGIHYLNSFGEDKTANLTISNNVFNNSKKSVFVEHINNVDITSNVFINSNYAISTYTGRHINIKNNYFYGGGSDNSSRKGYIDINSHFTDISGNVFRKIGTEDSFGPVIYIKVRDNITIAGNAFIENTVAHGNGIISSLFGGFYYIDGITDVDGPLGNVEVNHNYFANNSLNDGAIFESRASKINIEHNIIENNDGLIILANETYYKTQYMNFTKNQIKDFTGDIMDYSYFYNSKNFDGSANEEYTGDSTSFLDKIFDFVKNLWDEYVKGKNSVKDPNNVDTNKNTTSSGSDVADNTDDSRDDIKSNSTDSSGDSDVGDSLDKSHYSAKNSLSESESNVGDSSSGLSSDSSSPEVHELEKSNVSKDIADDNYLIWIVLVIVVIFALLAIGYNKR

SEQ ID NO: 45 - DNA, 5826 bp, Methanobrevibacter smithii
atgaaattaaataaaatgatgttggttagtatgttattactagctattttaactcttggtgcagttagtgcacaagaagattcatctgctgatgtgttagcagttgatagtgcttcatcccatgttttagatgatgggataagttatgataaaacgatttatgtgaatactactggggatgattcaaatactggtagtcaaaatagtccttatgctacaataaataaaggtatttcaagtgttaatgcttctgataatgctgttatttatttaagtaaaggaacattcactggagataataatactgatttaagtattagtttagctcatgaaaaatatggcggttctttaactattattggtcaggggaatgataaaacatttattgatggtgaaagtgtaagttcatttcttaaatctgttagtggagatactgctttaactttgataaacatttctttcattaatggaaaagctagtactggaagtatgattaattgtggaggtaacttaactgttgataattgtgtatttgaaaataattatgcaactggttcccaaggagctattgtttctaaaggtatggatttaaaagtaactaattctgtatttaaaaacaacaaggcttcaaatcagggtcctgacatttgttttaataacaataaaggtaatgtttatatagataattcttctttttacaatgctactaatacaggatattcctgcggagcatctgtatacatatccaattctaaaaatgctaaaataactggaaatacttttaaagatattgttggtaattacaatgatgcggctcttcaaatttccagcggtaatggtcaaataatgaataatgtatttattaattgtactaattccaatacagagactggttattgggctcaatatggagtaatatatatagaagggaataatatattaaaacaaaataaatttgtaaattcttcttctaaaatgggattaatttataataatggttttatgaatgctgttattacatttaataatgtattcactgataaaactacttttactttaagtgcaactataactgatgatgcaggaaatactattgcttctcttagaaatattgaatttaatatagatggtatgaaagtaggtgaaagtggttcagataatggttttgcatcagtttctgtttccaaattatttgacaatggtaaacatgaaataaacggtaattataatggagaaaataatactttcaatccagctacattaactgtcaatattgacagaacccctgcggaattctgggtttctacaaagggtaatgatacaactggtgacggaagtaaaaataatccgttcaacacaattaatcatgcaataactgcaggattagataaatcaatcaacattactattcatattatggatggtacttatttaggtactggcaatgttaatttaaaatataatagaatagctgttttaaatttaattggtgaaaattatggtaaaacaattattgatggtcaggataaagattatttcttctattttgataaaggattagatgtatctcttactaatttaacatttactaatggaaaagcaactaatgttaattggaattggggaataatttacggatcttcattaactatgaatgattgtattattaaaaattccacatctaatagtaatttattatatgatatagatactcaaaactcaaaattagtatttaataatttaacttatattaacaataaaggaaatatgtggttaggttatgcaacaataaacaattcctattttgcagataatgtaggtgctactcttggtggagttataagaggaactaacaatttaactgttactaattctaaattcataaataatactaatcctaaaaatagcaatgctgaaggtggagctgtttatgcccaaaatattataagtataaataatatttatgattcaaattatgctggaactaatggtggagctgtttatgtatctggtggtgcaaaaacaatatttataaatgatacttttataaacaaccgtgctgctggtgatggtggtgctgtatatgcttacataagtagtagcagttttgttcctgttgcaacttttgaaaatgtcaaatttataaataactccggagctaatggtggagcagctactgtttcaggagctacctttaacaatgttacttttaaagataacactgctaacactatgggtggagctatttatttattttctgtaacaaatggtaaaaccagcaatattccagatttaactatttctaatgattctttatttgaaaataataatgctcctgaaggtaaggatatttatatttccacacctgttgctaataatggtgttgcaaatgtaactggacttacaattactttcaatgatttaaatgttgcagaattagcaggtaaattaactgcacaagtaacacatcctagtggagcagttattagtggaaacactgttacatttttaattgatggaaattatgcaggaattgctgatgtagttaatggcatagctacttataattatgtcggatttgaagacggtaaatatagtttaagcggaacttatgatgcaaatggtaaaaattacatatataaaaatggaactataactgttaaaattaatactattttagataatatcacagtttatgtgtctgatgctaaaggtaatgacagtactgcagatggatctttagctaaaccgtttaaaaccattaaaaatgcattagaatatgctcaatctaaatctaggacagttactgttcatgtattggaaggtacttatactggaaatcttaatgctgatttggatattcaggtaaatacggatatttcaattgttggtgatggagaaaacaaaacaataatttttaatcctgatgccaaatactttatcacagctttacaaggtaaaggttctcttaaaatagctaatatgactattaatagagttggaaaagatacacaatctgcattatatgttgagaaaaatgttcatgtactgattgatacagtggaatttattaatggaaaaggtaattatggtggagctattaactctgcaggtattctaactattaaaaattcatatttctttaataatggtcatgcagacccagtaaaacgtcaaaatgcatatgctggtggagcaatttacaatgatggttatttaacaattgataatacaacttttgtagcaaatcatgcaactagagcttcaacaattgcaaatcagggtaatttatacatgaataattctcagattattgacagtatatctgcttcttctttgaacatagattatagggttattgcttcttttaatgtaggtcaaattggtaatataactcttgaaaacactaaaatttcagtaactggaaaaactcctttggaacttgttaattcaagtaatatctatcagggagatagatctgtaacctgtcttggttttggaagttctgaaaaaatagtctttaataatgtaactgttgacggaaatggatcatctactatgggatcttatgtatttggcggatttaacagttggaatactgttgggggaggtagaagtcaaactcctaaagatatttatgtatataattcaacattttccaatttgctatctgtaaatatattttatgaaaaaattaactctacaagaatatttgacggatgtatttttgataatgttgaatatttagtggaggttacttcctcaactataaatgatgctattataattaaaaattctgttatttatggtgatgtaaaagttggtaaagttaatggtgttaatataactcttaatttagataataattggtggggaagcaataatgcaacttattacaatgcagttatacgtctttcatctggatataatagtgtaataactgaattaagtaaagagattgctactccagataattatttggttttaactttagatgttaccaacaaaacaggtttattgcaggatgctgttttagctttcaaagtatttaatggaaccaattttactgattataatggttctttaccagtacgtaacttcaacatgtctgcagcaaatgctactttaagcatgactaagggtacaatagctaataatgttgttaatggttttgaagcaaaagaaggtaattatactatttctgctactgttgacggtcagagtgtaacttataatggtggtgcttctttaggaaaaggaattattgatgttaaagatatttctcttgattatggtgaagttataatagctaatgctactttaagggatactaaaggcaatttattatctaatataaatgtaaccttgaaagttaatggtaaaacttattacatggttactgatgaaaatggtgtagctagttttgtcattggacaattaaatgctggaaaatacactttagtttactctgtcgatgactcaaaagttattgttccaactacaaattcatctactttaactgttaataaagctaaagactctttaaaagtagatattgatgcgggtgtagctggtgaagatgttgtaattactgttaatggtcctaaagatcttaaagaaaacattactgtaactgtggataaaaatgtttataatatagttcttgttaatggatctgcaaaattaaccattaaagatttaactgcaggaaactataatgtgactgttacttatcctggagacagtaattatgataaacaggtaatcaggactaatttcactgtagatattaataaaaaagttaatttaaacatttctgacattgtgatgatttacaaagacggtaccagaatggttgctgttttaactgattatttaggcaatcctatagctaatgctactgtgtactttactattaatggtcaaacttatgctaaaacaactgatgctaatggtactgcttcaatgggacttaacttagtatctaatgtttatcaggctactgtttcatataatggctcagatatgtataataaaataagtaagaatattactgtaactattaatccgactattataagtaaagatttagttaaaatgtatcagaatgctaccagattctatgctaagtttactgacagtacaggaaaagcactggctaacattgaagttaaatttaacattcatggtgttttctacaccaaaaagactgataaagacggggtagctgatttaggtattatgttaagacctggaaattacattttaacagcttacaacccgttaaccggtgaagaaaaaggatttaacataactgtaaaatcattaatcatgcaaaacgatttaaccaaatactacttaaatgcttccagatttgaagcaactgtctacaacaaagacggatctttagcagtaaacaagaatgtaacctttaacatcaacggagtattctatactaaaactactgataaaaatggtgttgcaagcttaggaattgctttaagaccaggaaattacactattacaacaatgtatgacggattggatattggaaacagagtcagtgtcttgccaactttagtaactaaggatttaaatatgaaacatttagacggcagtaactttactgctttaactttagacggtcaaggtaaaccattagctaaccaaaacgtatcatttaacgtaaacggtgtcttctatcacaaagttactaataaagacggtattgcaagcttaggaatcagattaatgagcggggaatacattataacttcctactggaacgatttccaaactggaaacacaataaaaatcagtccttaa

SEQ ID NO: 46 - protein, 1941 aa, Methanobrevibacter smithii
MKLNKMMLVSMLLLAILTLGAVSAQEDSSADVLAVDSASSHVLDDGISYDKTIYVNTTGDDSNTGSQNSPYATINKGISSVNASDNAVIYLSKGTFTGDNNTDLSISLAHEKYGGSLTIIGQGNDKTFIDGESVSSFLKSVSGDTALTLINISFINGKASTGSMINCGGNLTVDNCVFENNYATGSQGAIVSKGMDLKVTNSVFKNNKASNQGPDICFNNNKGNVYIDNSSFYNATNTGYSCGASVYISNSKNAKITGNTFKDIVGNYNDAALQISSGNGQIMNNVFINCTNSNTETGYWAQYGVIYIEGNNILKQNKFVNSSSKMGLIYNNGFMNAVITFNNVFTDKTTFTLSATITDDAGNTIASLRNIEFNIDGMKVGESGSDNGFASVSVSKLFDNGKHEINGNYNGENNTFNPATLTVNIDRTPAEFWVSTKGNDTTGDGSKNNPFNTINHAITAGLDKSINITIHIMDGTYLGTGNVNLKYNRIAVLNLIGENYGKTIIDGQDKDYFFYFDKGLDVSLTNLTFTNGKATNVNWNWGIIYGSSLTMNDCIIKNSTSNSNLLYDIDTQNSKLVFNNLTYINNKGNMWLGYATINNSYFADNVGATLGGVIRGTNNLTVTNSKFINNTNPKNSNAEGGAVYAQNIISINNIYDSNYAGTNGGAVYVSGGAKTIFINDTFINNRAAGDGGAVYAYISSSSFVPVATFENVKFINNSGANGGAATVSGATFNNVTFKDNTANTMGGAIYLFSVTNGKTSNIPDLTISNDSLFENNNAPEGKDIYISTPVANNGVANVTGLTITFNDLNVAELAGKLTAQVTHPSGAVISGNTVTFLIDGNYAGIADVVNGIATYNYVGFEDGKYSLSGTYDANGKNYIYKNGTITVKINTILDNITVYVSDAKGNDSTADGSLAKPFKTIKNALEYAQSKSRTVTVHVLEGTYTGNLNADLDIQVNTDISIVGDGENKTIIFNPDAKYFITALQGKGSLKIANMTINRVGKDTQSALYVEKNVHVLIDTVEFINGKGNYGGAINSAGILTIKNSYFFNNGHADPVKRQNAYAGGAIYNDGYLTIDNTTFVANHATRASTIANQGNLYMNNSQIIDSISASSLNIDYRVIASFNVGQIGNITLENTKISVTGKTPLELVNSSNIYQGDRSVTCLGFGSSEKIVFNNVTVDGNGSSTMGSYVFGGFNSWNTVGGGRSQTPKDIYVYNSTFSNLLSVNIFYEKINSTRIFDGCIFDNVEYLVEVTSSTINDAIIIKNSVIYGDVKVGKVNGVNITLNLDNNWWGSNNATYYNAVIRLSSGYNSVITELSKEIATPDNYLVLTLDVTNKTGLLQDAVLAFKVFNGTNFTDYNGSLPVRNFNMSAANATLSMTKGTIANNVVNGFEAKEGNYTISATVDGQSVTYNGGASLGKGIIDVKDISLDYGEVIIANATLRDTKGNLLSNINVTLKVNGKTYYMVTDENGVASFVIGQLNAGKYTLVYSVDDSKVIVPTTNSSTLTVNKAKDSLKVDIDAGVAGEDVVITVNGPKDLKENITVTVDKNVYNIVLVNGSAKLTIKDLTAGNYNVTVTYPGDSNYDKQVIRTNFTVDINKKVNLNISDIVMIYKDGTRMVAVLTDYLGNPIANATVYFTINGQTYAKTTDANGTASMGLNLVSNVYQATVSYNGSDMYNKISKNITVTINPTIISKDLVKMYQNATRFYAKFTDSTGKALANIEVKFNIHGVFYTKKTDKDGVADLGIMLRPGNYILTAYNPLTGEEKGFNITVKSLIMQNDLTKYYLNASRFEATVYNKDGSLAVNKNVTFNINGVFYTKTTDKNGVASLGIALRPGNYTITTMYDGLDIGNRVSVLPTLVTKDLNMKHLDGSNFTALTLDGQGKPLANQNVSFNVNGVFYHKVTNKDGIASLGIRLMSGEYIITSYWNDFQTGNTIKISP

SEQ ID NO: 47 - DNA, 5730 bp, Methanobrevibacter smithii
atgagattaaataaagtgatgttagttggtattttattactggctattttgactcttggtgctgttagtgctcaggagggttcttctgctgatgttttggcagttgatagtgcttcatctcatgttggtgatgggataagttatgataagacgatttatgtgaatactactggtgatgattcaaattctggtagtcaaactagtccttatgctacaataaataagggtatttcaagtgtcaatgcttctgataatgcagttatttatttaagtgaaggaacattcactggggataataatactgatttaagtattaatttggctcataaaaattataatggatctttgacttttattggtcgaggatatgataagacatttattgatggggaacagatggctcctatttttaagtcaatgagtggggattctataattgtttttaaaaatattgcatttattaatggtaaatccaatactggtggtgctattacaagtaatgctgttttaactattgataattgtttgtttgaggataattatgcaacaggttataatggtggtgcaatttatcaacaatctaatgattttaaagtaactaattctatttttaggaataatagtgttaatagttatggaggatcaatttttgcaagtagtatgcaaaatgcacaacttatgaattgtgtatttgaaaattctattgctagaagcacttattgtactggtgcaggtgcatatattaatgtatataatagtactataattaagaataataggtttgttaatatatccacttcaggtaatgcatatgatgctgcattatatgctaattccggatataatggaaatggtattattgtaaacaatacttttatcaactgtaacaataaagggcaaagtagtgctgtaattaatattaatggtaagaattttgttaaaggtaatgcttttgttaattctacttctgcaagtaaaggtcaaatatttaatggtggaagtatgaatgtaattattacttttttaaataattctacaacttctcctacttttaaagtttcatgtagagtaactgatgtagatggaaacaatgtttcaggtcaaactcaggcatataatggtgttactttttatattaatggtgaacaggtaggtcaagcagcagttactaatggtttagctgttttatctctaactaagttagttcctaatggtgatttagttattaatggtacttggggcagtaataatgtttctatgactccgggtattttatctgttaatattgatcaaactcctattgatttatgggttgatggtgtaaatggtgatgatttaactggtgacggttctaaacttaatccgtttaaaaccattggttatgctataaactacggttttggaaaatctttatatccaactatccatataaatagtggaacttatagtggagttaataatactaatttaactttttctaaccttggtaacttaactttggtaggtgaaggatataataaagtattaattgatggtcaaaatagaaattggtttttaaaaactggtagttacacaaatgtcgtattaaaaaatttaacttataaaaacggttcaataacaaaatatattagtggattatattcattaataactactaatgcaccttctgttattgaagattgtataatttctgacaatgttaacacttatggtggtaagattatagatggaagttctactattgataatttgacattttgcaataatacaggtatgattactggtgtttcatctattgataaatcttatttagctaataataaaataaataatgcatataatctttatttccttgaaggaggttatattaatataactaattctgtatttgaaaataattttggtttagttagggctactcagcaaggtatttctattaataataagtttataaataacactggttcattactttcttttattttatctaaaaatgattatttcaagaaaaataatggaactgcatttataggattttcaaatacttataataattataaaatgctttgtgatgtgattaattctacttttattgattgttttggtgataaaggtggagcaattcaaactgttatgggttctattgttgattgtacttttataaacaattctgcaaattatggtggtgcaatttacttagctcctcatcatacttctgattattattctgtagattctaatattacattaactggctgtattttcaaagataacacagctgtaattaatggtaaggatatttacatagaacattctgacaataagcaatatgttgatgctaagttaactaatcttactataactttcaataatttaactactcaatttttagcagatactgtgtctatgtctgtatctcatatttctggtgctgtaattggtggaggttctgttaagttctatttgaatggtacttatatgggaacttctgaggttgttaatggtattgcatcactagattatcttggatttaaaaatggaacttatactttgtctggtgattatgtatttgcagatgcaagtgataaaatcattaatggaactgttaaagtagctttaaaaccattaaaaaataatgtaactgtttatgtttctgataaattaggtgatgatgtaaatggtgatggcagcttagctaaaccatttaaaacaattaaaaaagcattaaactacggatattctcaaagttatgtgttatttattcatgttttggaaggtatttattcaggtgaaggtaatacaaatattgagctttcatctactgtaagcgtaacaattactggtgctggagttaataaaactattttatgcggtaatcaaactaatgatttctttacaatagctaaaggcagtaatataattactattgaaaatatgagtatggttaatggttctaaagcagatgctagtgcagtatatccatatcaaaatgtaaaaaatattcattctcctattattgctttgccaggttcaaatgttcatttaaataatatttactttgaaaataataaaggaactcttgggggagcagtattaaactctggaaatatgattattaacaactgttcatttgtaagaaatggtttttcatcatatggtggaggattaactaacaatggtactttaatagttaataattcttacttctttgcaaattatgcatacaggggatcaaatatttttgtaattaaagacatgactttacagaattcattagttgaagaagcttactggtggagtggatctcactatggaaacattgtaggaattgatgctggtataactttaattaatactacaattcaagaccttggaagaacttcaactgatgctggaagaacagatattcaaaataaaaaaggttacatatatttagctggtttaaatagagttgaatcatatggatgtattttcagatacaatgaatcaatagctgctggagatatatttggatcatattatggttcttctgcagagtataactggcaaaatattattaaatttgataattgtacttttataaacatcaataacattaacaatgttggttttagacctaatttaaacagatctggtaatgtatctttaaataattgtattattgatattaaaggtaaagttttaacaactaatgcatttggcatacttaacattactaattgttatattgtaaatccaaatgctgtttcatggactaatttaggcagtccaactactggaatcattgatttaaataacaattggtggggtaacaatactcaaccagtatttactgttgttgatgcaaacagaacccttgttaatatgactcctgatacatggttggttttaactttagatgttactaataacaccggtttgttgcagggtgctgttttagcatttaaagtctttaatggaactaatttaactgattataatggttctttaccattacgtaatttcaatatgtctatggttaatggtactttgagtattgctaatggtacaatagctaataatgttgttaatggttttgaagctaaagaaggtaattatactatttctgctactgttgacggtcagagtgtaacttataatggtgttgcaagtattggtaaaggtattattgaagttaatgatgttgttgctgattatggtgatgttgtaattgctaatgctactttaatggatgctaaagataatccattagctaatgttaatgtgaccttgaaagtcaacggtaaaacttatactttagttactgatgaaaatggtactgtcagttttgtaattggacagttaaatgccggaaaatacactttagtttactctgtaagtggcagtaaagttatttctgatgtaactaattcttcaactttaactgttaataaagctaaagattccttgaaagtagatgttaatgctagtgttgctggtgaggatagtgtaattaatgttgttggtcctaaagatgcaacaggcaatgtaactgtattggtaaatggcaaatcttataatgtagttcttgttaatggatctgcaaaattaaccattaaagatttagttgcaggaaactataatgtgactgttacttattctggtgataaaaactatgaaaaacaagtaatcaggactaatttcactgtagatattaataaaaaagttaatttaaacatttctgacattgtgatgatttacaaagacggtaccagaatggttgctgttttaactgattatttaggtaatcctatagctaatgcaactgtgtactttactattaatggtcaaacttatgctaaaacaactgatgctaacggtactgcttcaatgggacttaacttagtatctaatgtttatcaggctactgtttcatataatggttcagatatgtataataaaataagtaagaatattactgtaactattaatccgactattataagtaaagatttggttaaaatgtatcagaatgctaccagattctatgctaaattcactgacagcacaggaaaagcattagctaacactgaagttaaatttaacattcatggtgttttctacaccaaaaagactgataaagacggtgtagctgatttgggtattatgttaagaccgggatcttatattttaactgcttacaacccgttaaccggtgaagaaaaaggatttaacataaccgtaaaatcattaatcatgcaaaatgacttaaccaaatattacttaaatgcttccagatttgaagcaactgtctacaataaagacggatctttagcagtaaacaagaatgtaacctttaacatcaacggtgtattctacactaaaaccactgataaaaacggtgttgcaagcttaggaatagctttaagaccaggaaactatatcattacaacaatgtatgatggattagacattggaaacaaagtcactgtcatgccaactttagtaacaaaagatctctccatgaaacacttagacggcagcaattttactgctttaactttagatggtcaaggtaagccattagctaaccaaaatgtatcatttaacgtaaatggtgttttctatcacaaagttactaataaagacggtattgcaagcttaggaatcagattaatgagtggcgaatacatcataacttcctactggaatgacttccaaacaggaaacacaataaaaataagtccttaa

SEQ ID NO: 48 - protein, 1909 aa, Methanobrevibacter smithii
MRLNKVMLVGILLLAILTLGAVSAQEGSSADVLAVDSASSHVGDGISYDKTIYVNTTGDDSNSGSQTSPYATINKGISSVNASDNAVIYLSEGTFTGDNNTDLSINLAHKNYNGSLTFIGRGYDKTFIDGEQMAPIFKSMSGDSIIVFKNIAFINGKSNTGGAITSNAVLTIDNCLFEDNYATGYNGGAIYQQSNDFKVTNSIFRNNSVNSYGGSIFASSMQNAQLMNCVFENSIARSTYCTGAGAYINVYNSTIIKNNRFVNISTSGNAYDAALYANSGYNGNGIIVNNTFINCNNKGQSSAVININGKNFVKGNAFVNSTSASKGQIFNGGSMNVIITFLNNSTTSPTFKVSCRVTDVDGNNVSGQTQAYNGVTFYINGEQVGQAAVTNGLAVLSLTKLVPNGDLVINGTWGSNNVSMTPGILSVNIDQTPIDLWVDGVNGDDLTGDGSKLNPFKTIGYAINYGFGKSLYPTIHINSGTYSGVNNTNLTFSNLGNLTLVGEGYNKVLIDGQNRNWFLKTGSYTNVVLKNLTYKNGSITKYISGLYSLITTNAPSVIEDCIISDNVNTYGGKIIDGSSTIDNLTFCNNTGMITGVSSIDKSYLANNKINNAYNLYFLEGGYINITNSVFENNFGLVRATQQGISINNKFINNTGSLLSFILSKNDYFKKNNGTAFIGFSNTYNNYKMLCDVINSTFIDCFGDKGGAIQTVMGSIVDCTFINNSANYGGAIYLAPHHTSDYYSVDSNITLTGCIFKDNTAVINGKDIYIEHSDNKQYVDAKLTNLTITFNNLTTQFLADTVSMSVSHISGAVIGGGSVKFYLNGTYMGTSEVVNGIASLDYLGFKNGTYTLSGDYVFADASDKIINGTVKVALKPLKNNVTVYVSDKLGDDVNGDGSLAKPFKTIKKALNYGYSQSYVLFIHVLEGIYSGEGNTNIELSSTVSVTITGAGVNKTILCGNQTNDFFTIAKGSNIITIENMSMVNGSKADASAVYPYQNVKNIHSPIIALPGSNVHLNNIYFENNKGTLGGAVLNSGNMIINNCSFVRNGFSSYGGGLTNNGTLIVNNSYFFANYAYRGSNIFVIKDMTLQNSLVEEAYWWSGSHYGNIVGIDAGITLINTTIQDLGRTSTDAGRTDIQNKKGYIYLAGLNRVESYGCIFRYNESIAAGDIFGSYYGSSAEYNWQNIIKFDNCTFININNINNVGFRPNLNRSGNVSLNNCIIDIKGKVLTTNAFGILNITNCYIVNPNAVSWTNLGSPTTGIIDLNNNWWGNNTQPVFTVVDANRTLVNMTPDTWLVLTLDVTNNTGLLQGAVLAFKVFNGTNLTDYNGSLPLRNFNMSMVNGTLSIANGTIANNVVNGFEAKEGNYTISATVDGQSVTYNGVASIGKGIIEVNDVVADYGDVVIANATLMDAKDNPLANVNVTLKVNGKTYTLVTDENGTVSFVIGQLNAGKYTLVYSVSGSKVISDVTNSSTLTVNKAKDSLKVDVNASVAGEDSVINVVGPKDATGNVTVLVNGKSYNVVLVNGSAKLTIKDLVAGNYNVTVTYSGDKNYEKQVIRTNFTVDINKKVNLNISDIVMIYKDGTRMVAVLTDYLGNPIANATVYFTINGQTYAKTTDANGTASMGLNLVSNVYQATVSYNGSDMYNKISKNITVTINPTIISKDLVKMYQNATRFYAKFTDSTGKALANTEVKFNIHGVFYTKKTDKDGVADLGIMLRPGSYILTAYNPLTGEEKGFNITVKSLIMQNDLTKYYLNASRFEATVYNKDGSLAVNKNVTFNINGVFYTKTTDKNGVASLGIALRPGNYIITTMYDGLDIGNKVTVMPTLVTKDLSMKHLDGSNFTALTLDGQGKPLANQNVSFNVNGVFYHKVTNKDGIASLGIRLMSGEYIITSYWNDFQTGNTIKISP

SEQ ID NO: 49 - DNA, 6306 bp, Methanobrevibacter smithii
atgttatttttgattatattgtcttcaataagtttagctagtgctagtgatgattttaacagtactaatgttgatgataatgtaattgttgaaaataactatgatacagactctattattggagataatggggataacaatgtttatgtaaatccttctgcaaatttatctatagtacctgatggtagtcaggataaaccatattcttcaattggtgaagcagttaatatggctagtgataattctactgttattcttatggatggaatttatagcagtccaggtgatttaaacattgaaataaataaaaatttggtaattaaatcattaacgggcaatgtaacagttaatggtaatggacaaagtacattttttaatattttcgagtccaaatcattaattttggaaaatattaactttgtcaatggaaaaacaactgaatattctagttattatggtgttatttacaataaaggatttttaacattgtcaaatgtggaatttaagaatattaattcttttatgggagttatttacaatgaaggcgacttaaaagtttatgattctaaattttctaattgtgttggttctaattatgcggatatgatttttaatttgggagactgtagtgttgttaatagtaaattgattataagctattcaaataagaatcctgcaatttataattttcataatttatttgtgaataattctcaaacttttggaatttcttcaaaccctaattttgatgttgatatttttaaaagcattaccatgactgttattaactcaaaagtagggcaattagcatgtaataatggtacattggtagttaaaaatacaactgctgatgcgggttttagagcagaaaactctgtagttaatataagtgatgtgtactttagaacttccggttattcaggtttgtcttctctatttaattctgatgcaactattaaatcatcatattttgatagcagtattaatattgctaattctaatcttaatataacttattctgtggtattaggcgaaatttatggtaatggtgcttatgcaaataatgtttcagcaaattataattggtggggggtaaataaaggaccttctcttaagtatgttaaatcagacactaaatattgggttgtaatgacttttgaatgtgatgagtctccgattaaagtaggtactaatgcggagtttagggcaactttaaataaatatactgatggggattccatgaaatatttggataatccttctttacttcctcaaatgagtgttaaattcgagtctcaaaatggtaaatttgattatagtagtggaactttagttaatggtacattttctaattatttaagaaacaataatgaaagttcaattgtttatgctgtaattaattctcaaagattaagacttattgtcggtacaggattaactgattatgattggtatgtttcaccaacaggacacaacgggtttggtgatggaagtcatgataatccctataaaactttggatcatacaatagctaaagcattaaatggaaatactatttatttgttaaacggcacttatacaaataattggaattcaaatttggaaattgttaaaaatttatctgttgttggtgttggtaatgtaattttaagtagggaaaatgaccgtaatatattcatagttaaagaatggggtagtttgactcttaaaaatttaaattttacagttaatttaaaacagtattctaatgaattgattattgttaaaggaggaaatttaacagttttaaattccaatttctatgatatccgttctgttggtattgtttcaacaagtaatggtgttcaaaataacggtaatgtatatgtggacaacatcacttttaaaaacattgtaggtccattaattagaggcggagccaatattactattaataatatatctgctgaaaaatgcagcaatatttacacttataggggtatggaagcatacaatgtttgtttccctgtctggaattatatttctatttccaattcagtatttagaagcaatactgtaggtattgttaatttaaatcctactatttattcttcttcatcttcattaggtaaaaatatagttggggatttatctaaaagtactgtatttgcatacattactaattgttcttttgtagagaataatttcatacctggtgattattatgcaagtaatcgcataggacttggattaggacgcagtgtttatggaacctgtcatggagaagtaaacaattgttcttttattaaaaataatggtaggttaattgaaggggctgttgtaaataattctttctttgattccaatactgtttgttatgtaagtgctgatttaatcaataattcttatttctataaaaatgacaattccggtataggtaatctggattctacctattcatataggggaatagctactgctaatgaagtttattattctgtttttattgaaaataaagctgcttatggtggtgctcttgcaggtactaagattgttcattattctgtatttttgaataattctgctacttacggaggtaatgatatttttgtttatgacggtgaagttgattattcaagtaactggtggggttctaatcaaaaacctgatggtaataggatttttgtacatatcggatctttaactcttgataattgggtaatcatgtctttagatgctgttacaaacactcatattattgctgctttaaataaattaattgataataatggaaatattagtagtttggataaggttcttccaactagagatgtttatttctcatcagattatggaataatatctccacttaacacttctcttgtaaataataaagctgatgcatatgttgttcaaaatgaaactactgctgactttaatgtttatgcaaggattgataatcaacttttagacttaacacttagaaataataacactcagttaataatggatgatgtagtagtttatggaaacaataataattatgaaattactttaattaatgtaaacggtcatagaattttcaatcaggctttaactgttgttattacaactccaaatggtgaaaaagagtacttcactttagtaactgatgaaaaaggctatgccaagtttgagttgacttatcctgtaggggtatataacatatctgtttattatgatggtaatggttattttgaagggtgtaataaatctgctcagattactattagtccatctgttacttatttgattagttataattacactttttatggtaaaaatgttaatttttatgcagttttaacaaatggacaggtaggaattgttaatcaaagtataacaatcactattattgattctaaaggaggaacaagggctgctgttattactactgattctactgggcgtgctgatgcactattaagtttggatgttggaaaatatactattaaatgtgagtataaaggtgacggctggtatctgccaagctcttctgtatcttatgttgaaatccgtcctgttaattcaacaattgaagtgcctgatgttgttttctatggtgttggaaatgagtataatatcactttaagggatgaacacggtacattaattagaggagagtatattaaggttgttataactcagggcaatttgtctgatacttttactttgcaaactggtgatgatggagtagccagattaactattaattatcttccgggtacttatcagataactgccagctatgcaggtgatgatgtttacggttctgcaaaaggcagtggaactattactgttaataaggttttaacagttatttcaggtttccactatagtaaaattccattaaatggtgtttatactgttgttttaactgatatgtttggtcacagagtaactaatgcaactataaagttaaatctgtacaaaggagttttattaaaaacttatactggtgtaactgatggtaatggagaagtaactttccgtattgctcaaggtgaaggtacttatttagctacttttgattttgatggtgatatatggtatattgattcaactggtgctgctactattgttgttgatagtcaaactgcacctggtcaggtttctattaatgcaagtgattttgttcagtattatggtgaaaataggtattttgtaatttctttcaatgatactaatgcatatagtttgtatggtaagaatattgctgttacaatttcttccggtgattggcagcaaacttacaatgttgttactgacatttatgggtatggccgtttgcagattactttaaatcctggtatttataatattacttaccaatacactaacccatattatggtttgtttgctaaaaattcaagtaccgtgtctgtttatcgtatgccgactacaattcttgcatctgacgttattatgaatgttggtgaagctaagtattatgtgataaaactacttgatagcaggaatgcagctgttaaaaatatgcaaatcatgattgatataaatggaacaaactacacagccactacaaataatgatggtgtagctcgtttactcttaagtcttggtgttggtaagtatctgattagttatcatatagataatccaaattatattccatcatccggttcatcttatatattggtggttgattctaacaggacttctactaacattgaatctggtgatgttaatggttatgataatgagtctatgaatttcactgttgttttaagtgatgttttaggtaatcctattaattatgctactattttagctaatatttctacaattgatggtgattttgtcggatcttacaaaggagtaactgcaaaagatggtaaggtaatatttagctttgatttagattatggcagatatattatttccacttattatttaggcagtaattcctatcttggaagttatggagttaactatgtgaatgtggagtctgtaggcaatactactaaaacagttttaattgctggagattctgaattaagtggtagcagtaattactatgttgttttaattgatgaaaacggaacatatatcaaaggcaaggaaattaaatttgcagttggtaatcaaagttattatgctattacagattctgaaggtaaggcatttttggatactgttttatctcccggattctatgatattaaggcaacttttggcggtgacgatacctataaaaaatcatctgtaaaaactactttggttgtttcaggaaattcaacatatctgtttgccttaaactgcactaaaaattatcgtaatggaacacaattttatgtacaattattggattcctattcaaatccattggtaaatcgtacaatagctataactattaatggaaaaacttataatcgcacaactgatgaaaatggttgggcaactatgaatattaaccttagacctggcgaatatgaagtgttatgtgcatattatggtcctactgaatcagacaatgcatttgcaaaagctattgtgaaagttttaccgacaatattgggggacaatctggttaaatattatcttaatgagtctcagttccatgttaaagtaattgatggtgcaggtaatccaatagctaatactaacgtgtcaatgaatattaatggtgtattctatgttcgcaaaactaatgatgatggtatagctacattaggtattaaattatgggctggaaagtatgttttaacagtacataatccttatgatggtttattaatgtcatttaatgttacagttctgccaacagtagaagctaacgatttggtcaaatattatcgcaatgactctcagttctatgctaaatttttagacggtcagggtaatccattagctaatgctaaagttaagtttaacattaatggtgttttatatactcgtgaaactggtggggatggtgtagctaagttaaatattaatttaaatcctggggaatatattttaacagctattcatcctgacggtcttcaagttggtaaaaaagtaactgttttacctactttggaaggtagtgatctgactatgaattatagggatggcagtcagtttaaggctcgtttagttgacggtactggtcgtgcattagctaatgagactgtgactttcaacattaatggagtattttataacaagattactgatgttaatggtgttgccagcttaaatattaatttgatggctggtaaatacattattacatctgtctatggtagttatgctacttctaatactattttagtgaacaaattataa

SEQ ID NO: 50 - protein, 2101 aa, Methanobrevibacter smithii
MLFLIILSSISLASASDDFNSTNVDDNVIVENNYDTDSIIGDNGDNNVYVNPSANLSIVPDGSQDKPYSSIGEAVNMASDNSTVILMDGIYSSPGDLNIEINKNLVIKSLTGNVTVNGNGQSTFFNIFESKSLILENINFVNGKTTEYSSYYGVIYNKGFLTLSNVEFKNINSFMGVIYNEGDLKVYDSKFSNCVGSNYADMIFNLGDCSVVNSKLIISYSNKNPAIYNFHNLFVNNSQTFGISSNPNFDVDIFKSITMTVINSKVGQLACNNGTLVVKNTTADAGFRAENSVVNISDVYFRTSGYSGLSSLFNSDATIKSSYFDSSINIANSNLNITYSVVLGEIYGNGAYANNVSANYNWWGVNKGPSLKYVKSDTKYWVVMTFECDESPIKVGTNAEFRATLNKYTDGDSMKYLDNPSLLPQMSVKFESQNGKFDYSSGTLVNGTFSNYLRNNNESSIVYAVINSQRLRLIVGTGLTDYDWYVSPTGHNGFGDGSHDNPYKTLDHTIAKALNGNTIYLLNGTYTNNWNSNLEIVKNLSVVGVGNVILSRENDRNIFIVKEWGSLTLKNLNFTVNLKQYSNELIIVKGGNLTVLNSNFYDIRSVGIVSTSNGVQNNGNVYVDNITFKNIVGPLIRGGANITINNISAEKCSNIYTYRGMEAYNVCFPVWNYISISNSVFRSNTVGIVNLNPTIYSSSSSLGKNIVGDLSKSTVFAYITNCSFVENNFIPGDYYASNRIGLGLGRSVYGTCHGEVNNCSFIKNNGRLIEGAVVNNSFFDSNTVCYVSADLINNSYFYKNDNSGIGNLDSTYSYRGIATANEVYYSVFIENKAAYGGALAGTKIVHYSVFLNNSATYGGNDIFVYDGEVDYSSNWWGSNQKPDGNRIFVHIGSLTLDNWVIMSLDAVTNTHIIAALNKLIDNNGNISSLDKVLPTRDVYFSSDYGIISPLNTSLVNNKADAYVVQNETTADFNVYARIDNQLLDLTLRNNNTQLIMDDVVVYGNNNNYEITLINVNGHRIFNQALTVVITTPNGEKEYFTLVTDEKGYAKFELTYPVGVYNISVYYDGNGYFEGCNKSAQITISPSVTYLISYNYTFYGKNVNFYAVLTNGQVGIVNQSITITIIDSKGGTRAAVITTDSTGRADALLSLDVGKYTIKCEYKGDGWYLPSSSVSYVEIRPVNSTIEVPDVVFYGVGNEYNITLRDEHGTLIRGEYIKVVITQGNLSDTFTLQTGDDGVARLTINYLPGTYQITASYAGDDVYGSAKGSGTITVNKVLTVISGFHYSKIPLNGVYTVVLTDMFGHRVTNATIKLNLYKGVLLKTYTGVTDGNGEVTFRIAQGEGTYLATFDFDGDIWYIDSTGAATIVVDSQTAPGQVSINASDFVQYYGENRYFVISFNDTNAYSLYGKNIAVTISSGDWQQTYNVVTDIYGYGRLQITLNPGIYNITYQYTNPYYGLFAKNSSTVSVYRMPTTILASDVIMNVGEAKYYVIKLLDSRNAAVKNMQIMIDINGTNYTATTNNDGVARLLLSLGVGKYLISYHIDNPNYIPSSGSSYILVVDSNRTSTNIESGDVNGYDNESMNFTVVLSDVLGNPINYATILANISTIDGDFVGSYKGVTAKDGKVIFSFDLDYGRYIISTYYLGSNSYLGSYGVNYVNVESVGNTTKTVLIAGDSELSGSSNYYVVLIDENGTYIKGKEIKFAVGNQSYYAITDSEGKAFLDTVLSPGFYDIKATFGGDDTYKKSSVKTTLVVSGNSTYLFALNCTKNYRNGTQFYVQLLDSYSNPLVNRTIAITINGKTYNRTTDENGWATMNINLRPGEYEVLCAYYGPTESDNAFAKAIVKVLPTILGDNLVKYYLNESQFHVKVIDGAGNPIANTNVSMNINGVFYVRKTNDDGIATLGIKLWAGKYVLTVHNPYDGLLMSFNVTVLPTVEANDLVKYYRNDSQFYAKFLDGQGNPLANAKVKFNINGVLYTRETGGDGVAKLNINLNPGEYILTAIHPDGLQVGKKVTVLPTLEGSDLTMNYRDGSQFKARLVDGTGRALANETVTFNINGVFYNKITDVNGVASLNINLMAGKYIITSVYGSYATSNTILVNKL

SEQ ID NO: 51 - DNA, 5640 bp, Methanobrevibacter smithii
atgttgattttggtaatgatttgttgttttattttatcattaagtgcagttagtgcaatagatgatactgataattctacaattgttttggaacagaatgacaacgtaattattaaccatgaatctaataatttggatattggtaatcaggatattgttttaagcccaattattggcggcaaaactattgaaattactcaaaataattatgataattatttctacaaattcaatggtcaaatcaaaaatgaatcaggaattgtagctggagatactttaaaaataggcaatatatctgatagaggttttgttattgatcgtcagttaactttaatgcctttagataatacttctaaaatttcaaatggatttattcatttagttaaaggtagtgatggatctacagtttcaggacttacaattaacaatactaaaggtgcattatctattaatggaatatatgtaggtcagttacatggtatttggataactaaatctaacaataatacaattgttaacaatacaattagaatagctaatgctgcaggtgtttatgcaatgcctatgggatggtctagctataatagaattattggtaatgatatgagtacttacattacctgtgtaatggttatgggtcaatgtcattataatataatttctaaaaataaattggaaactctggattataatgatttgatagttagtaatctgatttactttaatccctttggacatgcagattatggtggatcaccgttatgtttaggtaacgttatttcagataattaccttaaagcattttgtaatggagcaatgtctattgtgttacagttggtttatgaaaaccatatcaacacaactattgctaataatactattattcgtggcagttatggtattagcttatattcagataatgctacagtatataataatactattatagaaagcagtatttcagtttctgcaatgggtaagaatatatctgttacctataataacgtaactggaactagtcagggtaatggtattttagttaatggtgaaaaaggatattctgctattgttgcacataataatgtaacatttacagatatttattgtgctatcggtttaagtaattatactgaagcttttaacaatactgttaatattaagaattatggtgtaggtattagtatcactgataattgttcttatgttcatgataataaaattaaagttaatcatgataatgctattacatttattggatgtaacaatactatttcaaataatatggttgatactcatgctgtaggtatatctgtaacttccacatcaaatgtcatgagatattattataataatattttaaacaatgttattcgcagtgaaagttatggtatttctattaaaggtttaatctataaaactaccatatcaggtaatgtaattgaaactaatgctagtgttggtatctacaaagagattactgatgaacttgcagacaataactctgacaacatgattaatggggttatttatgatgcaacagctttagttattaatgatgacaatttctacaaatactttgatgaaagaggttatttgaattatacttttgaagcaaataagactaaagtaatcttctttacattcttatctaacaaggatgtattcataacagaaaaaatcaatattattagtaataaacaaagcaatcttttatttaatgttactatttcattaagtggagatgctagcggatcattaattcgtgattttaatttctataatatgaataaagaagctatagtcttaaatggtgtagatgatgtttcgttatctaacaataatattacattaatgttgaaggataaaagtcctgctaattcagctatttcagttgttgatgtatgcaatggcataattctaaaaaataataatatttatattaattcaaaagctgcttatgcttatggtattagtatgcctgcttataatcctataagattaacttataataaagtaatgtcttcaggatttagaatttccggaaatactattatcatgattggtactggtgtaactgaagctatttatgctgatgttttaactgaaagtgaaattatgggaaataatattaacattatttctgatggtgcagcttacggtatagcaagctgtaatgttattggcagtccccatgatttgaatatttctaataataatattgttattcattctaaggatatggcatatctcatcgagttgcataaaaattataatgtcacttttgtgaataattatctttatggtaattctaacggtgtttatggtattggcacatatatgtcagacaacatttctattataaacaacactttcaatatctttggtggtaatttatctaaaattactgaaattcatgatatattaggtattggacaaggggctattggattaattaaatttacaaataatacaaatattactggtaatttaatttatgctaatgtaacaaatccaatatttgttgagaataatacttctattgttgagttaggtgttacttattatgttattgatgataataattgcggaatatactttaatgatactataaactctaaaattattaaaaacaatgatgtgttgctacttaataatttaactaaaggtcaaactttaagtattgatattccagttaatatcacatattataaagaaaatgtaagttcaattgttaacctgattcttaatagtggtgcttcatcagttaatattactaatttaactttaattaactctacattaacattaaacaatgtttctaaagtttatattaaaaataataatttaacaaactctagtgtaattgttgttggcggtatgggtaattatgtaattaataatagtttatctggtggaaaaagtaatgtaatgattaaattacttgatacttcttcaaatcatataatttctaataatatgactttcagcaatcttgaaaatgttgtaattattaaaaattctaaagataatgaaattgcttataataatatgtcaggaatagctgataaggttgtttattctgttgattctggatatactaactttaatcataataatttaactattagtggcttttccatatttggatattatgcttataattctgcatatgattcaataaaatacaatgatataatcattactggaaattcaagcgttactaatcaatcagctgtcttctttactggcaaatcagtaagtaatactgtagctcataataacatattttcttattcattgaaaggagatgattatgcagttatgattataactaatgagaatttgtttaataaagttataaacaattatcttattagtggtaatggatctaaacgtgcaaatgcagctgtttatgcattgcatgatttggttatagataatactccatttgcactttatgttgcaattggcggtagtgatactgcaggtgatggtagtaaagagcgtccttatgcttctctggcttttgctttaggtaaatctttaaatcattgtgtaatttacttgcttgatggaacatttaatgattctaatcttgttattgataaaaatattactattttagctattaatccgggtaaagtatttattgatgcaaataatagtcagttatttactattttaactaatggtactttaacaataaatggattaattgtatctaatggacataatgttaatggaggttcattatttgttaataatggtactttatacattaataattcaataatttgcaactcttctgcttattttgataatagtaatcctgatttcataaataaaactgtagatgacagaggcaaggagtactggtatactgttgactgtaaaaatactggattaggtggagctatattaaattacggtaatttagttattaatttaactgaattatctggaaattatgctcatagaggtggagctatagcggactttggtaaaactactattctttcatcagtaattcgtgataataaaggtgttcatggtggggctatttacacagattcatctaaatcttttacaattaataatactgtattttacatgaatgttgcagttcttaatttggatcattgtatgcttgaaaggtattctaccggatggtctattgatgaaggtgttcgttatgaacacagatcagtatgtgaagttcctttaggtactggtggagcaatatttaacaaaaatactgttttagaagttgctaattcaatatttgatcataataatgcttataaaggaggagctattggaactatttcaaattatggtgaatattcaacatataaaccaaaagcttcattgaacttaactaattgttcttttacaaataatgtggctaattccactattgaaggtaataattctaacttgaattcttatgtttataggaattatggtgatggtggagcaatttatggaacatttgataaattcactcttaaagattctattgtccgttataataaggcagtagttaatggtggagcattatctgttcaggcaaatgatggacgtattgatggttgtataattactgataatcgtgcaggaagtaaaggcggtgctttagacatatctaataacttcctaattactaatacaattataagcaataattctgcaagttatggtggagctatcagttacggttcatatgtttactatggccacactcagaataatttgaatatctttaattcaactatctctaataatcttggtttggaatcaggtggggcattttatttaggatctgctaatatggttatacataattctaatattgtaaataacaaagcacctaaagctgaaagtttcagtgtatatgacagttcacatttatatgttgatgcaaggtataattactgggaatctaatggtaaaaaaggagtcccagatgattctccttttaatttaggtgataaaattgtatttaagccattagtcaggtcaattattaattgggctcctactgtagtaccagacaagccaaatggaaatggaactgttactccgggaggtaatgataagcctgcttccggccctacagtgattactaagacaaatcctatttggcatactggtcctcaaattggaggccaaggtaaacctggtggaaataccggtcctggtccttccggtcctggtggtggaattcctggtcctggaagtaatttaggtcctggcggtggtggccaatatggtcctaatggtggacctgctcaaggtggaaatcctacttcaaatcagggagttaatggcagttctaatgctaatagtttaagccaaatagatggtggtaatgctaatgaaaacttacttactgtaggtttgactgcaaatgcagcttcttcagctagtgctggcggatctagttcatctgatgctggagagtctagttcatccagttccagcagtgatgatgttaaagcatatgagattgatgaagaggatgtaactaagcaattagacaatccaaacacaatatttacatttattggtttaatcattattcttataatctgtctgtttataggttataaacgcagaaaagatagggaaaatgaataa

SEQ ID NO: 52 - protein, 1879 aa, Methanobrevibacter smithii
MLILVMICCFILSLSAVSAIDDTDNSTIVLEQNDNVIINHESNNLDIGNQDIVLSPIIGGKTIEITQNNYDNYFYKFNGQIKNESGIVAGDTLKIGNISDRGFVIDRQLTLMPLDNTSKISNGFIHLVKGSDGSTVSGLTINNTKGALSINGIYVGQLHGIWITKSNNNTIVNNTIRIANAAGVYAMPMGWSSYNRIIGNDMSTYITCVMVMGQCHYNIISKNKLETLDYNDLIVSNLIYFNPFGHADYGGSPLCLGNVISDNYLKAFCNGAMSIVLQLVYENHINTTIANNTIIRGSYGISLYSDNATVYNNTIIESSISVSAMGKNISVTYNNVTGTSQGNGILVNGEKGYSAIVAHNNVTFTDIYCAIGLSNYTEAFNNTVNIKNYGVGISITDNCSYVHDNKIKVNHDNAITFIGCNNTISNNMVDTHAVGISVTSTSNVMRYYYNNILNNVIRSESYGISIKGLIYKTTISGNVIETNASVGIYKEITDELADNNSDNMINGVIYDATALVINDDNFYKYFDERGYLNYTFEANKTKVIFFTFLSNKDVFITEKINIISNKQSNLLFNVTISLSGDASGSLIRDFNFYNMNKEAIVLNGVDDVSLSNNNITLMLKDKSPANSAISVVDVCNGIILKNNNIYINSKAAYAYGISMPAYNPIRLTYNKVMSSGFRISGNTIIMIGTGVTEAIYADVLTESEIMGNNINIISDGAAYGIASCNVIGSPHDLNISNNNIVIHSKDMAYLIELHKNYNVTFVNNYLYGNSNGVYGIGTYMSDNISIINNTFNIFGGNLSKITEIHDILGIGQGAIGLIKFTNNTNITGNLIYANVTNPIFVENNTSIVELGVTYYVIDDNNCGIYFNDTINSKIIKNNDVLLLNNLTKGQTLSIDIPVNITYYKENVSSIVNLILNSGASSVNITNLTLINSTLTLNNVSKVYIKNNNLTNSSVIVVGGMGNYVINNSLSGGKSNVMIKLLDTSSNHIISNNMTFSNLENVVIIKNSKDNEIAYNNMSGIADKVVYSVDSGYTNFNHNNLTISGFSIFGYYAYNSAYDSIKYNDIIITGNSSVTNQSAVFFTGKSVSNTVAHNNIFSYSLKGDDYAVMIITNENLFNKVINNYLISGNGSKRANAAVYALHDLVIDNTPFALYVAIGGSDTAGDGSKERPYASLAFALGKSLNHCVIYLLDGTFNDSNLVIDKNITILAINPGKVFIDANNSQLFTILTNGTLTINGLIVSNGHNVNGGSLFVNNGTLYINNSIICNSSAYFDNSNPDFINKTVDDRGKEYWYTVDCKNTGLGGAILNYGNLVINLTELSGNYAHRGGAIADFGKTTILSSVIRDNKGVHGGAIYTDSSKSFTINNTVFYMNVAVLNLDHCMLERYSTGWSIDEGVRYEHRSVCEVPLGTGGAIFNKNTVLEVANSIFDHNNAYKGGAIGTISNYGEYSTYKPKASLNLTNCSFTNNVANSTIEGNNSNLNSYVYRNYGDGGAIYGTFDKFTLKDSIVRYNKAVVNGGALSVQANDGRIDGCIITDNRAGSKGGALDISNNFLITNTIISNNSASYGGAISYGSYVYYGHTQNNLNIFNSTISNNLGLESGGAFYLGSANMVIHNSNIVNNKAPKAESFSVYDSSHLYVDARYNYWESNGKKGVPDDSPFNLGDKIVFKPLVRSIINWAPTVVPDKPNGNGTVTPGGNDKPASGPTVITKTNPIWHTGPQIGGQGKPGGNTGPGPSGPGGGIPGPGSNLGPGGGGQYGPNGGPAQGGNPTSNQGVNGSSNANSLSQIDGGNANENLLTVGLTANAASSASAGGSSSSDAGESSSSSSSSDDVKAYEIDEEDVTKQLDNPNTIFTFIGLIIILIICLFIGYKRRKDRENE

SEQ ID NO: 53 - protein, 301 aa, Methanobrevibacter smithii
MITVLSGGTGTPKLLQGLKEVIDPKDITIVVNTLENEYFSGVYVSADIDTVLYTMADMINEEFWYGVKDDTFITHERLEELGTPELLRIGDIDRATKIQKTLLMENHSLAEAVDIQANNMHIPSKILPMSNENSDIKIITDIGELEFHDFLIKHQCNPEVLDVKFSKVTPAEGIIDAINNSDAVIIGPSNPITSISPILSLDGVKEALENTHVIAVSPIIGTDSVSGPASKFMDALGIEVSSLGVASLYESFLDTIVIDKKDNNLKDDLEKIVSEVIVTNTIMKNLDDKKKLAKIILNDIS

SEQ ID NO: 54 - DNA, 906 bp, Methanobrevibacter smithii
atgattactgtactgtctgggggaactggaactccaaaattattacaaggtttaaaagaagttattgatcctaaagatattactattgttgtcaatactttagaaaatgaatatttttcaggtgtttatgtgtcagcagacattgacacggtattgtacactatggctgatatgattaatgaagaattttggtatggtgttaaagatgatacatttatcactcatgaaaggcttgaagaattaggcactccggagttgcttaggataggagatattgatagagctactaaaatacaaaagactctattgatggaaaatcattcacttgctgaagctgttgatattcaggcaaataatatgcatatcccttccaaaattttacctatgagtaatgaaaattcagatattaaaatcattacagacatcggtgaattggaatttcatgactttttaataaaacatcagtgcaatcctgaagttttggatgtcaaattttccaaagtgactcctgcggaagggattattgatgctattaataattctgatgcagttattattggaccatctaatccgataacttcaatatctccaatattgtctttagatggagttaaagaagctttggaaaatactcatgtaatagcagtttctccaattattggtactgattcagtaagtggtccggccagtaaatttatggatgcacttggaattgaagtttcatcattaggtgttgcttctttatatgaaagttttttagatacgattgttattgacaaaaaagataataatttaaaggatgatttagaaaaaattgttagtgaagtaattgttacaaatacaattatgaaaaatttagatgataagaaaaaattagctaaaataatcttaaatgatatttcttag

SEQ ID NO: 55 - DNA, 3168 bp, Methanobrevibacter smithii
atgattagaaaaataaacttaataagtttcattttcctatttatttttttgataggcactgtttctgccacaacaattgaaaatgaaactcaaacaataaacaatgatttagaaatcagtgacgacgagaacattcaagcaatagataatatagaaacatcaaatgaaatactttcgacaccaaaagctaaaacactaaccataattaattcaccacccgttgaaatgtattataaagacggcagcaaacttatagcaacattgaccgacaataataactatatgcaccatccaataagtaatgccaaagttataattaatattaatggagttaactacaccaaaattacagattcaaggggtcaggttatgttatccctaaatttggaatctggagagtatatggcaaaaataatatttgaaggctgtgatttttatcatccctcaagttcaaattccaaagtaacaatcaaacctacaataaatggtaatgacattgtcaaataccataaaaatgatacacagtactatgttgaatttagcgacaaaaaaggaaaccccataatcaattgcgaaataacacttaacataaacggagtattttacaaaaaaattacaaatatggcaggaatagctaaactaaatataaatttggatcccggaaactacataataacttcgtacaatccaaaaactaacgaacagcgttccaataacataactgtattggcgacaattagctgcaactatgacctggtcaaatactacaaaaataaaaaaacatattcagtttacctacacaatttagacggcagctatgccaaatattcaaaagtaaccttcaacataaatggagtattctataccaaaacttcagacaatacaggttatgcattcttaaatattaatttaaacccaggccattatataataacagcaatgtacaacagctgttttgtttcaaataaaatacttgttaaacctacaattcagacaaatgatttagaaatgaattttaaagacgggagcgcttttaaaacatttgtaacaactaatgaaggaaaacctgtaggagctggagaaaatgttacatttaatataaatggagtattttacaccaaaactacaaattcaaacagtattgcatctctaaacattaatttaaaccctggagaatacataataaccagccattacaagaatattcaaattggaaataaaataattattcaccctgcaaattcaacagtcatatctgaaaacttaaacagagactttacctatgaaatagctattccgaattatgtaaatgtaactcttcctaaagtagaagccaaaaataattatacagttaaacttggagaaaagggaattgtaaaactgccaaaaaaacagatatttgaaatcaataacggattgaaaaattatattctttcaaattatgaaacaaacgataaaacaagtatattgattaatgacaaatatgttttcatacctcttggtgaaaataaaatcaaaactggcaaaaccgcaagaatccaaaaaggcaacggcattttaatttattccagcgaaaattacacctatattcaatattataatagtgctgagagagacatcagtcaattcggagtcactatagataaagaaggcaaaatgggtgaaagaatcaattacattgaaaatggtgaaataagagcaagtgtcctatttaacactattggatttgatgaatatggaatcagatataatttagcactagctaatggcttagatcctgaaactgaattaaattccaattatataatacttacaaataataaaataagcccaataaagttcacatcaactaataaaacaataacattaaatacagctagagaaaaaatcatcggatacataaccaatgaaaaaatcaacactatatttaaaacaaacaacaatttagttgaaaaaacagaaaccataacttacggaacccatcctaagtataatgcaaacaataactttgaaatagttcagtcctatgccattatcaactccaaaattaccccaacagacatagaaaacttagcttttggacttgattatttaactagctataaattaaaatatgtgcagggaatgtttttatccggactaaatactgcttatttaagtgatttgaatgctgacaaatatgctgaaaagttatcccttaactggcagcggacaaaaacagcagttgttttaggcggaattgataatgacaaactttatatccacatagccaatccaaatatggggatgtctgtaattggaaaaaatgcaactaaaataactgaattcaacttcataacatctctacttctatcaaaaatagaacagcaggtaatgaaccctattggaattatttacagcaatgacatgaccagttcatttgatgaaatgatggatgcccttctaaaatcagaagttaacctcgtcaatcatggagattcaatatatgtattttgcaaaaatggaaacaaatcagtacttatcctaaacacaacaacaggaatctgcaaaactgttctggttgatgatgattttgcatataaaggagctactcaaaaaacagacaaaggtgaatgtacagtctgcataattcccaaattgtttgaagaaagcttaactaatcaactaaaaaacatcagaaaatttgtagacaacggaataatccaaataaataaaaatattgataattttatgaaaaatatccacccatcaactataataggatacaatattggtgttttatctctaaaaattcttggaggagctgtttcaggaatttcaacaattgtatttttcccagctacctttgcaatagcatttcaatcagtggccaacaaatacagagtgacatttgttgatgaagacgacacccattattggtacagtcattttacaccaagcagaccaggttattttcaggataccaagttgtttttaattcctaaaggaaaccaggaagtggactatgtcgaagtacatatcaattcggacaattctttaaaccgtagccaagcgaaatatataagcagtggtaatgtaagaaacttaaccaaagaagaaacataccagtattttgatgaagaatattgggatccacttaacactcctagaaaattaggaaaatattaa

SEQ ID NO: 56 - protein, 1055 aa, Methanobrevibacter smithii
MIRKINLISFIFLFIFLIGTVSATTIENETQTINNDLEISDDENIQAIDNIETSNEILSTPKAKTLTIINSPPVEMYYKDGSKLIATLTDNNNYMHHPISNAKVIININGVNYTKITDSRGQVMLSLNLESGEYMAKIIFEGCDFYHPSSSNSKVTIKPTINGNDIVKYHKNDTQYYVEFSDKKGNPIINCEITLNINGVFYKKITNMAGIAKLNINLDPGNYIITSYNPKTNEQRSNNITVLATISCNYDLVKYYKNKKTYSVYLHNLDGSYAKYSKVTFNINGVFYTKTSDNTGYAFLNINLNPGHYIITAMYNSCFVSNKILVKPTIQTNDLEMNFKDGSAFKTFVTTNEGKPVGAGENVTFNINGVFYTKTTNSNSIASLNINLNPGEYIITSHYKNIQIGNKIIIHPANSTVISENLNRDFTYEIAIPNYVNVTLPKVEAKNNYTVKLGEKGIVKLPKKQIFEINNGLKNYILSNYETNDKTSILINDKYVFIPLGENKIKTGKTARIQKGNGILIYSSENYTYIQYYNSAERDISQFGVTIDKEGKMGERINYIENGEIRASVLFNTIGFDEYGIRYNLALANGLDPETELNSNYIILTNNKISPIKFTSTNKTITLNTAREKIIGYITNEKINTIFKTNNNLVEKTETITYGTHPKYNANNNFEIVQSYAIINSKITPTDIENLAFGLDYLTSYKLKYVQGMFLSGLNTAYLSDLNADKYAEKLSLNWQRTKTAVVLGGIDNDKLYIHIANPNMGMSVIGKNATKITEFNFITSLLLSKIEQQVMNPIGIIYSNDMTSSFDEMMDALLKSEVNLVNHGDSIYVFCKNGNKSVLILNTTTGICKTVLVDDDFAYKGATQKTDKGECTVCIIPKLFEESLTNQLKNIRKFVDNGIIQINKNIDNFMKNIHPSTIIGYNIGVLSLKILGGAVSGISTIVFFPATFAIAFQSVANKYRVTFVDEDDTHYWYSHFTPSRPGYFQDTKLFLIPKGNQEVDYVEVHINSDNSLNRSQAKYISSGNVRNLTKEETYQYFDEEYWDPLNTPRKLGKY

SEQ ID NO: 57 - DNA, 14076 bp, Methanobrevibacter smithii
atgagtctaaaaaagaatattggtgtgttagttcttttattagtacttttaagtatgtctgcagtttctgctgaagacgtatctattaatgctgatgatacttaccaaacgccaaatgaaattcaaaaagatttcacatctttacaaacagacattgataattctcaaaatgtatttgagcttacttatgatgtcaaacatggagatgatgaaatagataattatggtatttctattacaaagaatactataattaacggaaatggtcatacaattgatgctaatggtcatggaagtatttttgtagtaaaagattcttctgttacattaacattaaatgatttgactttgattaatgcaaatcctgtttctgatagttcaggaattgtaagtaatggtggggctgtttactttgatggttctactttaatagtaaataatgtgaatttcaaaaacaatactgtctataaatatggtggtgcaatttacactactggaacttgtattgtagacagttctgtttttgatggaaatgatgtgcaattcagaagtcaaaatattggcaatggtggtgcagctatctatgcagataatggtgcttcattattaatttctaattcacaaataatcaataaccataaaaatatggttattcgtgacaataatgttggagatcttgtagctggtgtagtagtcgtaacaggatatactaaaatttcaaaatcttactttagaaataacagtggatgttatggtggagctgtaacttctttaggttacactaatgctggtaaaaatcagattatcattgaaaattcagtatttgattcaaatagagcattccaaggggcagctgtaaatgtcataggttctactttcaaaatatccggaaccaatttcaccaacaataaaggtgttggttatggaagtggaaatcctaatgtcggtgctcttcttacatggtatggctgtgaaggtacaatatctgattgtaattttataaacaatactgcagataatggtgctgcttatgaattaggagatgataataatggtgtttccagtgccagtgttgacagctgtacttttataaacaatactgcatccaatcagggtggtgctgtatatgaaggtggaacaacaggtaatgctattttggatattaaaaattccatatttaccaataactctgcaaaagaaggcagtgctatttataatgaatatacattaactattgatgctgattcaacatttactaataataggatttacagctattataggggtactttaaatatgggtgaaattaaaacctttactgatttgcaaaaagctataaacatggttgaaggtgatatctatttaagttctaatgtaactatgttggctagtgaagctgataagtttgtaaatggtattgttgtagaccatcttgttaatcttaaatgtgatggttttactattaatgctaataatttaggtagaatatttaatgttacctcaacagctgataaattaaatatatataatgctaatttaattaatggtaatgcagatataggtggtgcaatatataacactggttctgtatatgcatataacactaattttataaacaatactgctgctactatgggtggtgctgtattcaataatggtgaattggttgtttctgattctgtatttgattctaatgatattgttaatcgtggttctgctagtgttgattatggtggtgcagcgatttataattggaaagagggcacattaaaagtaactaattctaattttactaataatattaagaattataagaatggggataatttagttggtgctattactactattggtaatgctactgttagtggttctaactttgttaataactctggccgttggggtggagctatttcagctactggtgctgaattaaggaaaaattcaagtactttaacagtatctaatactatatttaaagataattctgctttatatgcgggtgctgtttacatatggggatctaattacaatatagctgattgtgtatttgataacaatactgcatttggtaaaggtaatatgactccaaataataataatggtggtgctcttgttgtatctcaagtaagtagattcaatgaaccaatcactggtactatttccggttctaaatttactaataataaagctcaatatggtggtgctgcttacttcaataaaggatttgtaactattactgattctgtatttgaaaataacatagctactgctgaaggtggagctgttggcttttctcatgcaagtgttaaagatttagttgtatccataaataattcttcatttgtaggtaataaagcacctgttgctggagctatttttacaaatgttgattcaaagattacaaattcaaacttcattaataactctgctgctaaaataggtggagctatatgtaatgtaaatgatttaactgttgaaaattctaaatttgttaataatactccacaagctattcataactctaaagaattacatttaggtattgaaacattcactgatttgcaaaatgctattgatcttgttgatggtattttaactcttgattctgatattgcaatgactgatgatgaagctgctggatttgtaggtggtgttgctattaataaggatattgttattgatggtaaaggccatactattgatgctaagaatttaggtaggattttcagtattggtgaaggatttgctgttactttaactaatgctactttgattaatggtaaagctgataagggtggggctatttataatgatggttctttaactttaagtgatgttaaattaagtgataatgctgctgatagttatggtggtgctgtattcaacaatggtgaattggttgtttctgattctgtatttgattctaatgatattgttaatcgtggttctgctagtgttgattatggtggtgcagcgatttataattggaaagagggcacattaaaagtaactaattctaattttactaataatattaagaattataagaatggggataatttagttggtgctattactactattggtaatgctactgttagtggttctaactttgttaataactctggccgttggggtggagctatttcagctactggtgctgaattaaggaaaaattcaagtactttaacagtatctaatactatatttaaagataattctgctttatatgcgggtgctgtttacatatggggatctaattacaatatagctgattgtgtatttgataacaatactgcatttggtaaaggtaatatgactccaaataataataatggtggtgctcttgttgtatctcaagtaagtagattcaatgaaccaatcactggtactatttccggttctaaatttactaataataaagctcaatatggtggtgctgcttacttcaataaaggatttgtaactattactgattctgtatttgaaaataacatagctactgctgaaggtggagctgttggcttttctcatgcaagtgttaaagatttagttgtatccataaataattcttcatttgtaggtaataaagcacctgttgctggagctatttttacaaatgttgattcaaagattacaaattcaaacttcattaataactctgctgctaaaataggtggagctatatgtaatgtaaatgatttaactgttgaaaattctaaatttgttaataatactccacaagctattcataactctaaagaattacatttaggtattgaaacattcactgatttgcaaaatgctattgatcttgttgatggtattttaactcttgattctgatattgcaatgactgatgatgaagctgctggatttgtaggtggtgttgctattaataaggatattgttattgatggtaaaggccatactattgatgctaagaatttaggtaggattttcagtattggtgaaggatttgctgttactttaactaatgctactttgattaatggtaaagctgataagggtggggctatttataatgatggttctttaactttaagtgatgttaaattaagtgataatgctgctgatagttatggtggtgctgtattcaataatggtgaattggttgtttctgattctgtatttgattctaatgatattgttaatcgtggttctgctagtgttgattatggtggtgcagcgatttataattggaaagagggcacattaaaagtaactaattctaattttactaataatattaagaattataagaatggggataatttagttggtgctattactactattggtaatgctactgttagtggttctaactttgttaataactctggccgttggggtggagctatttcagctactggtgctgaattaaggaaaaattcaagtactttaacagtatctaatactatatttaaagataattctgctttatatgcgggtgctgtttacatatggggatctaattacaatatagctgattgtgtatttgataacaatactgcatttggtaaaggtaatatgactccaaataataataatggtggtgctcttgttgtatctcaagtaagtagattcaatgaaccaatcactggtactatttccggttctaaatttactaataataaagctcaatatggtggtgctgcttacttcaataaaggatttgtaactattactgattctgtatttgaaaataacatagctactgctgaaggtggagctgttggcttttctcatgcaagtgttaaagatttagttgtatccataaataattcttcatttgtaggtaataaagcacctgttgctggagctatttttacaaatgttgattcaaagattacaaattcaaacttcattaataactctgctgctaaaataggtggagctatatgtaatgtaaatgatttaactgttgaaaattctaaatttgttaataatactccacaagctattcataactctaaagaattacatttaggtattgaaacattcactgatttgcaaaatgctattgatcttgttgatggtattttaactcttgattctgatattgcaatgactgatgatgaagctgctggatttgtaggtggtgttgctattaataaggatattgttattgatggtaaaggccatactattgatgctaagaatttaggtaggattttcagtattggtgaaggatttgctgttactttaactaatgctactttgattaatggtaaagctgataagggtggggctatttataatgatggttctttaactttaagtgatgttaaattaagtgataatgctgctgatagttatggtggtgctgtattcaacaatggtcatttagttgtcggtaattctgtatttgattctaatgatattgttaatcgtggttctgctagtgttgattatggtggtgcagcgatttataactggtatgacggtattttaactgtatctggttctaatttcactaataatattaagaattataagaatggtgaccgtttagttggtgctgtagctactattggtgatgctacaatttctgattcttactttgttaataactctggccgttggggtggagctatctcagcttcaggttatttgattgctggtgatgatgtaaatactttaactgtatctggttctacttttaaagaaaatggtggattatatggtgcaggtatttttgtagctggctctgactttactgtgtctgattgtgtatttgataagaatactgcatttggtaaaggtaatatgactccaaataataacaatggagcagctattgtagtaactgatactggtaaagatattactggagctataactggttctaactttactaataataaagctcaatatggtggagctatctatatttgtgagggtaatattgcaatttctgattcattatttgaaaataactctgctgatgttgaaggtggagctattgatattgattctgcaataaataatcctgtagttactgttaaagattctaaatttgttaataatactccacaagctattcataactctaaagaattacatttaggtattgaaacattcactgatttgcaaaatgctattgatcttgttgatggtattttaactcttgattctgatattgcaatgactgatgatgaagctgctggatttgtaggtggtgttgctattaataaggatattgttattgatggtaaaggccatactattgatgctaagaatttaggtaggattttcagtattggtgaaggatttgctgttactttaactaatgctactttgattaatggtaaagctgataagggtggagctatttataatgatggttctttaactttaagtgatgttaaattaagtgataatgctgctgatggttatggtggtgctgtatttaacaatggtgaattggttgtttctgattctgtatttgattctaatgatattgttaatcgtggttctgctagtgttgattatggtggtgcagcgatttataactggtatgacggtattttaactgtatctggttctaatttcactaataatattaagaattataagaatggtgaccgtttagtaggtgctgtagctactattggtgatgctacaatttccgattcttactttgttaataatgctggccgttggggtggagctattactacttctggtgctttgattgctggtgatgatgtaaatactttaactgtatctggttctacttttaaagagaatggtggattatatggtgcaggtatttttgtatggggatctgactttactgtgtctgattgtgtatttgataagaatactgcatttggtaaaggtaatatgactccaaataataacaatggagcagctattgtagtaactgatactaataaagctattgctggaattattactggttctaactttactaataataaagctcaatatggtggagctattgatatttgtgaaggtaacattaaaattacagattcagaatttgttaataactctgctgatgttgaaggtggagctattgatattagtactgttaagggtaatcctgaagtttcaatttccggttctaaattcattaacaatagtgcatcctatggtggtgctatagttaatgtgaaagatttaactgttagaaatactgaatttgttaacaatactcctgatgccatatttaattatgttggatttggaggcaaccttgatttaggtattgagaattttactgatttacaaaatgctattggtcttgttactggtactttaactcttaatcaaaatgttgtaatgactgatgatgaagctgctaattttgtaaatggtgtaattattaataaaaatattagaattgatggtaaaggtcatactattgatgctaagaatttaggaagaattttcgagattgatggaggatttgctgttactttaactaatgttactttaactaatggtaaagctgataatggtggagctatttataactttggtaatttagatttagtgcatgttaattttgttaataatactgcaaaatatggtggagcaatcatgaacgatgcttatggtttagttttagatgattctacttttactaataacactgctaagattggtggtgcaatttataactctgctgattgctttgttgtaggtaattctacttttgctaataacactgctacaagtaatggtggagtaatctttaattatggtattggttttgttgtaggtaattctacttttgtgaataatagtgctgcagacggtgctggtgcaatcctgaatggtggccgtggttttgttgtaggtaattctacttttgctaataacactgctacaagtaaaggtggtgccatttataattatggtattggttttgttgtaggtaattctacttttgctaataacactgcagaagatgctggtgcagtttataatgagggtgataactctgttgtaggtaattctacttttgttaataatactgcaacttcaataggtggagctataattaataatggtaaattagtagttgataattctgcatttgaagataatgctgctaattattatggtggagctatctttaactgggatgatttacaagttactaactctgcatttgatggaaacgatatccttgttcgtaacatccgtgctatggataatgttgatcatggtggagcagctatttacaactggaaaaatggtaaattggatatttcaaaatctaactttacaaacaacattaaaaattataaaaacggtaatttattagttggtgctgtagctactattggtgatgctactatttctgattcctattttgttaataactctggccgttggggtggagctttatctgtaatgggtggagaatctagtagtgctacaaatttcatcgacatagatggaactaaatttgttaataactctgctttatatggtggagcaatgtttgtatggggatctaattactctatttccaactctgtatttgataataatttagcatttggtaaaggtaatatgactcctaataataacaatggtggagctcttgtagtaactcagggtaatatacctatttcaggtaccattataaattccaactttactaataacaaagctcaatatggtggagcagcttggattaatgaaggaaccgttgatattagcaattctaactttataaacaacacagctactgttaaagcgggagctattggatttgaacctgcatatactaaaataactgctactgtttatgctactaactttataaacaacactgctggtgttgatggtggtgctatttatagtaatggtgatttaagaattagtgattcagactttgataataataaagcacaaaaagctgatattatttacagcaatataaatggcttattgagtattaatggtaataattatagtaattacactgaaaataaagctccaattattaatttggctggtatagaaactatttcaagtgatggtggagtaattataactgttttagataataaaactgtaaatgtttgttacggtgatgttgtaactttacatgctattattacagttgatggtgttcttgtagctaatcaggacttatcattttcagtttataatggtgaggatgttgttgtttgtaaagcaaatagcttgttaaatggttcttatgttgcaacttacaaaataaatgatgttattaataaaacagttagtattgtttatgatggacctgaagttcatattaacacaggtatcttaaatgtatcaaaagcaactcctgatttaactgttggtgcattgaatattactgttggagatcttgaaataattactgtaaccggacctaaagatgcaactggtcttataactttaactttaaatggtattgattatatattgccgatttacaatggtgaagctaaattctacttccaagatttagcttatggtacttatgatgtatctgcaagttattctggtgataatcattatgttgctgctgaaaactcaacagtctttaaagtagataaagttttagctaacttaaatatacatgttgaagatattacttttggtgaaaacggacttgtcataatcactttaccttctgatattgacggttcaatagttactgttaatgtaaatggtaaagtttatcctgtagatattgaaaacggatttggaaaacttccattacgtgaattggatgcaggtgattatactatatctgcagcatttgcaggtaatgataaatacttgcctggtgtaagcaatgctttattaactgtatctaaagcagaccctgcattaaatgtgcttatttcagatgttggttatgatggagtatttaacattaatgttgctttaactggtgttgatgctattggtttaaatggtaatgtgattgttactgttaataataaagattactctgtaaatatcgttaatggtaaaggtactgctgttggtgttaaattagctgctggtacttatgactttactgctgcttgggcaggaaatgataattacaatgctgttggtgattctggtaaatttagtgttgctaaagtagattcaattattgatgttgctgttaaagatatcaatgttggtgaagatgctgttattagtgttaaattgcttagtgatgctactggtagcgtaactgttactgtaaatggtaaagattatactgaaactgttgttaatggtgtagctaatgtaaaagtggctgatcttaaagcaggtacttatgatgtagctgttaaatattctggtgataacaattataatgctgcagttgctacttccagctttactgtatctaaagttgactctactatggatgtaactgttaatgacattgtatttggtggagatttaactgttgatgtggttttacctggtgatgctactggtgaagtagttattactgttaatggtgtagattatcatgtagctattgaaaatggtaaagctactggaactattagtggtttagctgctggtgattacattgtagctattaaatatgtcggtgatgataaatacactggtgttgaagttgctgaaaatgttaatgttgctaaagcacaacctgttttaggtgttgttattgctgatgtggattatggtaacggatttgttattgaagctaccttaactggtgttaatggtgctcctttatctggtaatgtgattgttactgttgctggtaaagaatacactgttaaagttactgatggtaaaggtattgctactggtgataaattagctgctggtacttatgcatttgctgctgtttgggcaggagatgataattacaatattgttactgaaaacggtgatttcaaagttaataaaatagattctgctattgatgttgctgttagtgatattaaagttggtgaagatgctgttattagtgttaaattagctagtgatgctactggtgaagtagttattactgttaatggtgaagattacactgcagctattgaaaatggtgtagctagtgtaactgtatctgatcttaaagctggtgattacactgtagcggttaaatatactggagataataattataatgaagcaactggcagtgctgaatttagtgtacttaaaataactcctgaaatggatgtaactgttgaggatattgtatttggtgaagatttaattgttaatgcggttttacctgttgatgctactggtgaagtagttattactgttaatggtgtagattaccatgtagctattgaaaatggtgaagctactgtaactgtatccggtcttgaagctggtgattacactgtagcggttaaatatgctggtgatgataattataatgctgctgaagttactaaaggtgttaatgttgctaaagcaaatccagctttaaatgttattatcgacagtgtggattatggtaatgtatttactattaatgctgttttaactggtgttaacaatgctcctttagatactaatataattgtaacagttaatggtaaaaactacattgtagctattgttaatggtaaaggtactttccatgctgataaattagctgctggatcttataacttcaatgctagattcgcaggaagcaataattataatgaagttagtgattccggtaaatttaatgtttataaagtagattctgctattggtataactgttaaagatatcaatgttggtgaagatgctgttattactgttaaattatttagtgatgctactggtgaattgactgttactgtaaatggtaaagattatactgcgaatgttgttaacggtagggctactgtatctgtatctgatcttaaagcaggcaattatgatgtagttgccaaatattctggtgataacaattataatgctgcagttgctacttccagctttactgtgtctaaagttgattctactatggatgtaactgttaatgacattgtatttggtggagatttaactgttgatgcggttttacctgatgatgctactggtgaagtaattattactgttgatggaacttcttacactgcaggtattaatgatggtaaagcaacacaagttgttaaagatttaactgctggcagtcatgtggttgttgttaaatatgctggtgacgataaatacactgctgttgaaattgctaaaggtgttaatgttgctaaagcacaacctgttttaggtgttgttattgctgatgtggattatggtaacggatttgttattgaagctaccttaactggtgttaacagtgctcctttatctggtaatgtgattgttactgttaatggtaaagaatacactgttaaagttactgacggtaaaggtattgctactggtgataaattagctgctggtacttatgcatttgctgctgtttgggcaggagatgataattacaatattgttactgaaaacggtgatttcaaagttaataaaatagattcatctgttgtggttaatgttaataatattaaagttggcgaagatgctgttattagtgttaaattagctagtgatgctactggtgaagtagttattactgttaatggtgaagattacactgcagctattgaaaatggtaaagcagttaaaacaatatctggccttaaagcagatgattatactgtaactgttaaatacgctggagataacaattataatgaagcaactgctgatgctgaatttagtgtatccaaaatatctgattacaatatggatatttctgttcctgaaattaaagagggagtaaattccactattggtgtagatttacctaaagatgcaaccggaacagttactgttgaaattgacggtaaaaaatacactgcaaatgtaattgacggaactgcaaatgtaattgtttctggtttaagtgctggagattataatatcactactgtttactctggtgatgctaaatatgattccatgactaaaaaaggaaacgtaactgtaattccaaatataaatgtaaacttggatgttagtgatgttgaaatgttttaccatgatggaactcgtttaattgccaaattaacagatttccaaggtaaaccaatagtcaatgctactatatacttcagtattaatggtgtaatatatgctaaaacaactgatgctaatggtactgcttccatgggtcttaatttagattccaatgtatatccagtaaccgtaacttataacggatctgctttctatagtaaaatctctaaaaatattactgttactattaattcaagtattatagctgatgatttagttaaaatgtatcaaaatgctacaagattctatgctaaattcatgggcagtgatggaaaagtattagctaatactcaggttaaatttaacattaatggtgttttctacactaaaactactaacaatgatggtgtagcggatttaggtattatgttaagacctggaacatatattttaacagcttacaaccctgtaactggtgaacaacaaggatttaacataactgtaaaatcattaatagtacaaaatgacttaactaagtattacatgaatgcatctaagttccaagcaactatctatgataaaaacggaagtttagcagtaaataaaaatgtaaccttcaacatcaatggagtattttacaccagaactactgatgaaaatggtgtaataagtttaggaatcagtttaagacctggagaatatgtcattacaacaatgtacgaaggattagacttaggtaatactgtaactgttttacctactttagttactagtgaccttaatatgacttatggagatggcagtaactttactgcacagacattagatggtcaaggtaatccattagctaatcaaaacgtatcatttaatgtaaacggcgtattctatcacaaagtaactgatgataatggttttgcttcattaactatcaggttaatgagtggaaaatacatcattacatcttcttggaacgatttccaaacaggaaacaacataataatatcttaa

SEQ ID NO: 58 - protein, 4690 aa, Methanobrevibacter smithii
MSLKKNIGVLVLLLVLLSMSAVSAEDVSINADDTYQTPNEIQKDFTSLQTDIDNSQNVFELTYDVKHGDDEIDNYGISITKNTIINGNGHTIDANGHGSIFVVKDSSVTLTLNDLTLINANPVSDSSGIVSNGGAVYFDGSTLIVNNVNFKNNTVYKYGGAIYTTGTCIVDSSVFDGNDVQFRSQNIGNGGAAIYADNGASLLISNSQIINNHKNMVIRDNNVGDLVAGVVVVTGYTKISKSYFRNNSGCYGGAVTSLGYTNAGKNQIIIENSVFDSNRAFQGAAVNVIGSTFKISGTNFTNNKGVGYGSGNPNVGALLTWYGCEGTISDCNFINNTADNGAAYELGDDNNGVSSASVDSCTFINNTASNQGGAVYEGGTTGNAILDIKNSIFTNNSAKEGSAIYNEYTLTIDADSTFTNNRIYSYYRGTLNMGEIKTFTDLQKAINMVEGDIYLSSNVTMLASEADKFVNGIVVDHLVNLKCDGFTINANNLGRIFNVTSTADKLNIYNANLINGNADIGGAIYNTGSVYAYNTNFINNTAATMGGAVFNNGELVVSDSVFDSNDIVNRGSASVDYGGAAIYNWKEGTLKVTNSNFTNNIKNYKNGDNLVGAITTIGNATVSGSNFVNNSGRWGGAISATGAELRKNSSTLTVSNTIFKDNSALYAGAVYIWGSNYNIADCVFDNNTAFGKGNMTPNNNNGGALVVSQVSRFNEPITGTISGSKFTNNKAQYGGAAYFNKGFVTITDSVFENNIATAEGGAVGFSHASVKDLVVSINNSSFVGNKAPVAGAIFTNVDSKITNSNFINNSAAKIGGAICNVNDLTVENSKFVNNTPQAIHNSKELHLGIETFTDLQNAIDLVDGILTLDSDIAMTDDEAAGFVGGVAINKDIVIDGKGHTIDAKNLGRIFSIGEGFAVTLTNATLINGKADKGGAIYNDGSLTLSDVKLSDNAADSYGGAVFNNGELVVSDSVFDSNDIVNRGSASVDYGGAAIYNWKEGTLKVTNSNFTNNIKNYKNGDNLVGAITTIGNATVSGSNFVNNSGRWGGAISATGAELRKNSSTLTVSNTIFKDNSALYAGAVYIWGSNYNIADCVFDNNTAFGKGNMTPNNNNGGALVVSQVSRFNEPITGTISGSKFTNNKAQYGGAAYFNKGFVTITDSVFENNIATAEGGAVGFSHASVKDLVVSINNSSFVGNKAPVAGAIFTNVDSKITNSNFINNSAAKIGGAICNVNDLTVENSKFVNNTPQAIHNSKELHLGIETFTDLQNAIDLVDGILTLDSDIAMTDDEAAGFVGGVAINKDIVIDGKGHTIDAKNLGRIFSIGEGFAVTLTNATLINGKADKGGAIYNDGSLTLSDVKLSDNAADSYGGAVFNNGELVVSDSVFDSNDIVNRGSASVDYGGAAIYNWKEGTLKVTNSNFTNNIKNYKNGDNLVGAITTIGNATVSGSNFVNNSGRWGGAISATGAELRKNSSTLTVSNTIFKDNSALYAGAVYIWGSNYNIADCVFDNNTAFGKGNMTPNNNNGGALVVSQVSRFNEPITGTISGSKFTNNKAQYGGAAYFNKGFVTITDSVFENNIATAEGGAVGFSHASVKDLVVSINNSSFVGNKAPVAGAIFTNVDSKITNSNFINNSAAKIGGAICNVNDLTVENSKFVNNTPQAIHNSKELHLGIETFTDLQNAIDLVDGILTLDSDIAMTDDEAAGFVGGVAINKDIVIDGKGHTIDAKNLGRIFSIGEGFAVTLTNATLINGKADKGGAIYNDGSLTLSDVKLSDNAADSYGGAVFNNGHLVVGNSVFDSNDIVNRGSASVDYGGAAIYNWYDGILTVSGSNFTNNIKNYKNGDRLVGAVATIGDATISDSYFVNNSGRWGGAISASGYLIAGDDVNTLTVSGSTFKENGGLYGAGIFVAGSDFTVSDCVFDKNTAFGKGNMTPNNNNGAAIVVTDTGKDITGAITGSNFTNNKAQYGGAIYICEGNIAISDSLFENNSADVEGGAIDIDSAINNPVVTVKDSKFVNNTPQAIHNSKELHLGIETFTDLQNAIDLVDGILTLDSDIAMTDDEAAGFVGGVAINKDIVIDGKGHTIDAKNLGRIFSIGEGFAVTLTNATLINGKADKGGAIYNDGSLTLSDVKLSDNAADGYGGAVFNNGELVVSDSVFDSNDIVNRGSASVDYGGAAIYNWYDGILTVSGSNFTNNIKNYKNGDRLVGAVATIGDATISDSYFVNNAGRWGGAITTSGALIAGDDVNTLTVSGSTFKENGGLYGAGIFVWGSDFTVSDCVFDKNTAFGKGNMTPNNNNGAAIVVTDTNKAIAGIITGSNFTNNKAQYGGAIDICEGNIKITDSEFVNNSADVEGGAIDISTVKGNPEVSISGSKFINNSASYGGAIVNVKDLTVRNTEFVNNTPDAIFNYVGFGGNLDLGIENFTDLQNAIGLVTGTLTLNQNVVMTDDEAANFVNGVIINKNIRIDGKGHTIDAKNLGRIFEIDGGFAVTLTNVTLTNGKADNGGAIYNFGNLDLVHVNFVNNTAKYGGAIMNDAYGLVLDDSTFTNNTAKIGGAIYNSADCFVVGNSTFANNTATSNGGVIFNYGIGFVVGNSTFVNNSAADGAGAILNGGRGFVVGNSTFANNTATSKGGAIYNYGIGFVVGNSTFANNTAEDAGAVYNEGDNSVVGNSTFVNNTATSIGGAIINNGKLVVDNSAFEDNAANYYGGAIFNWDDLQVTNSAFDGNDILVRNIRAMDNVDHGGAAIYNWKNGKLDISKSNFTNNIKNYKNGNLLVGAVATIGDATISDSYFVNNSGRWGGALSVMGGESSSATNFIDIDGTKFVNNSALYGGAMFVWGSNYSISNSVFDNNLAFGKGNMTPNNNNGGALVVTQGNIPISGTIINSNFTNNKAQYGGAAWINEGTVDISNSNFINNTATVKAGAIGFEPAYTKITATVYATNFINNTAGVDGGAIYSNGDLRISDSDFDNNKAQKADIIYSNINGLLSINGNNYSNYTENKAPIINLAGIETISSDGGVIITVLDNKTVNVCYGDVVTLHAIITVDGVLVANQDLSFSVYNGEDVVVCKANSLLNGSYVATYKINDVINKTVSIVYDGPEVHINTGILNVSKATPDLTVGALNITVGDLEIITVTGPKDATGLITLTLNGIDYILPIYNGEAKFYFQDLAYGTYDVSASYSGDNHYVAAENSTVFKVDKVLANLNIHVEDITFGENGLVIITLPSDIDGSIVTVNVNGKVYPVDIENGFGKLPLRELDAGDYTISAAFAGNDKYLPGVSNALLTVSKADPALNVLISDVGYDGVFNINVALTGVDAIGLNGNVIVTVNNKDYSVNIVNGKGTAVGVKLAAGTYDFTAAWAGNDNYNAVGDSGKFSVAKVDSIIDVAVKDINVGEDAVISVKLLSDATGSVTVTVNGKDYTETVVNGVANVKVADLKAGTYDVAVKYSGDNNYNAAVATSSFTVSKVDSTMDVTVNDIVFGGDLTVDVVLPGDATGEVVITVNGVDYHVAIENGKATGTISGLAAGDYIVAIKYVGDDKYTGVEVAENVNVAKAQPVLGVVIADVDYGNGFVIEATLTGVNGAPLSGNVIVTVAGKEYTVKVTDGKGIATGDKLAAGTYAFAAVWAGDDNYNIVTENGDFKVNKIDSAIDVAVSDIKVGEDAVISVKLASDATGEVVITVNGEDYTAAIENGVASVTVSDLKAGDYTVAVKYTGDNNYNEATGSAEFSVLKITPEMDVTVEDIVFGEDLIVNAVLPVDATGEVVITVNGVDYHVAIENGEATVTVSGLEAGDYTVAVKYAGDDNYNAAEVTKGVNVAKANPALNVIIDSVDYGNVFTINAVLTGVNNAPLDTNIIVTVNGKNYIVAIVNGKGTFHADKLAAGSYNFNARFAGSNNYNEVSDSGKFNVYKVDSAIGITVKDINVGEDAVITVKLFSDATGELTVTVNGKDYTANVVNGRATVSVSDLKAGNYDVVAKYSGDNNYNAAVATSSFTVSKVDSTMDVTVNDIVFGGDLTVDAVLPDDATGEVIITVDGTSYTAGINDGKATQVVKDLTAGSHVVVVKYAGDDKYTAVEIAKGVNVAKAQPVLGVVIADVDYGNGFVIEATLTGVNSAPLSGNVIVTVNGKEYTVKVTDGKGIATGDKLAAGTYAFAAVWAGDDNYNIVTENGDFKVNKIDSSVVVNVNNIKVGEDAVISVKLASDATGEVVITVNGEDYTAAIENGKAVKTISGLKADDYTVTVKYAGDNNYNEATADAEFSVSKISDYNMDISVPEIKEGVNSTIGVDLPKDATGTVTVEIDGKKYTANVIDGTANVIVSGLSAGDYNITTVYSGDAKYDSMTKKGNVTVIPNINVNLDVSDVEMFYHDGTRLIAKLTDFQGKPIVNATIYFSINGVIYAKTTDANGTASMGLNLDSNVYPVTVTYNGSAFYSKISKNITVTINSSIIADDLVKMYNATRFYAKFMGSDGKVLANTQVKFNINGVFYTKTTNNDGVADLGIMLRPGTYILTAYNPVTGEQQGFNITVKSLIVQNDLTKYYMNASKFQATIYDKNGSLAVNKNVTFNINGVFYTRTTDENGVISLGISLRPGEYVITTMYEGLDLGNTVTVLPTLVTSDLNMTYGDGSNFTAQTLDGQGNPLANQNVSFNVNGVFYHKVTDDNGFASLTIRLMSGKYIITSSWNDFQTGNNIIIS

SEQ ID NO: 59 - DNA, 1599 bp, Methanobrevibacter smithii
atgatatttttttgtgatattatgaagtttaataaaatatttttatttactttaatattattagcggcattatctttttcagctgtaagtgctgaatcttttgatggtaatgatgctgttgctgtaaatgatgctaataatgttattgtatccgaacaaagttttacagatgtaattagtggatctgaacctacaatttcagatgatgctaatcaaaattcaagtactggaggggatgtacctgctccttccactaatgcttctactggtgataatggaactaattccacaccggaagataaaaatagtactataatttctgaagatatttcattattctataaaaatggtaccagattttctgctattttcttagatgaaaacggaaaagcattagctaatcaaaatatcgtatttgttattaacggtgtatcttatactaaaaccactgatgaaaacggtatggcaagtattggtattaatcttgcaccgggcagctatgttatggaatctaaaaatttagctactaatgaaactgttaaaaataatgtaactgttatttcaacaattaatccatccaatgttgttaaattatataaaaacggcactcattattatgctacttttatagacggtcaaggtaatgctttagctaataaaactgttaaattcaatattaatggtgttttctatactagaactactgatgaaaacggtactgctagattaaacatttggttatatcctggcaactacatattaactgcttataatccaattaataatgaagcaagagcaagcaatgtcactgttttatccactattaatggaaaagatgttacaaaatactacagaaatggtactcactattctgcagttgttttagatagtaatggaactcctttagttaatcagactgttaaattaaatgtaaatggtgtattctataacaaaaccactgatgaaaacggtactgtcagattaaacatttggttacttccaggcagttatattataactgtttacaatccaagtaatggtgaagaaaactcaaacaaaatagaagttttatctaaacttgttgcaaaagacatgactgtagagtatcaagctggtaaaaattacacagttaaagtattggacggtcaaggtaaagctttagctaatcagactgttaaaattaatattaatggtgtgatttacactaaaattactgatgaaaacggtactgcttatttaggtataagattaaatccaggtaattatatatgtacttcttactggaacgattcttttgtttcaactaaaattgttgtaaataaattaacagcttcaatatctgttttaactcctacagttaaaaaaggagattactacaaagttaaaattacagataaaaaatccagcaaacctattgtaaatcagttagttttatttatctacaatggagttgcatatggatcatattctgataatgctggaatagctaagattaaaataggtttacctgtagggtcctaccagttaatcacaggtatccaaagcagttattggtatcagaatattgctgtgtacaacacccttaaggttacagcttaa

SEQ ID NO: 60 - protein, 532 aa, Methanobrevibacter smithii
MIFFCDIMKFNKIFLFTLILLAALSFSAVSAESFDGNDAVAVNDANNVIVSEQSFTDVISGSEPTISDDANQNSSTGGDVPAPSTNASTGDNGTNSTPEDKNSTIISEDISLFYKNGTRFSAIFLDENGKALANQNIVFVINGVSYTKTTDENGMASIGINLAPGSYVMESKNLATNETVKNNVTVISTINPSNVVKLYKNGTHYYATFIDGQGNALANKTVKFNINGVFYTRTTDENGTARLNIWLYPGNYILTAYNPINNEARASNVTVLSTINGKDVTKYYRNGTHYSAVVLDSNGTPLVNQTVKLNVNGVFYNKTTDENGTVRLNIWLLPGSYIITVYNPSNGEENSNKIEVLSKLVAKDMTVEYQAGKNYTVKVLDGQGKALANQTVKININGVIYTKITDENGTAYLGIRLNPGNYICTSYWNDSFVSTKIVVNKLTASISVLTPTVKKGDYYKVKITDKKSSKPIVNQLVLFIYNGVAYGSYSDNAGIAKIKIGLPVGSYQLITGIQSSYWYQNIAVYNTLKVTA

SEQ ID NO: 61 - DNA, 6110 bp, Methanobrevibacter smithii
gtgaaaaatagaaaaataattttaatattgattctgggattattttttatagcattaagcaatgttaatgctgaggataattcaactgtcactttaaaccattctaacacagaagatattggaattagtgaagctgacagtacaatagatactgatgaatcaaatcaaaatagtgcagatattgttaaaataaaagattataaccaaaaatatacatccattgacaacacaaacaaagttggagaaaatgtatatattggttcaaaatatccaagtattgaaaatacaataaccgttaatgacacaagtgagtttaataaaactggaaatataactgtaaatattcatgtaactggaaagttcaccatgggagaaaaagaatttaacaaaacttatttaataatttatgagaataacacaataataagccagaaaaccctaaacgaattaaatttaccaccataccaacactttacaacccctggaaattacacatttgacataagttttccgtaccatgtacaagataaaagtagattacaagtctatatttttggaatattttctaatacaattgtttttgaaaaattaaacaaaatacaactaacaaacctaacaaataacaatataattattgataataaaattaaatccaataataattggacaaattccataaactccattaaaaaagcattagatttagttgaaaatgaaggaacaatctatttatctaatttaaatataattcatgaccaaaatgaaaatattttaataaataaatccgttacaataattggaaataatgttacatttaatggatttgaaaaagaaagcctctttaatataacaaataatgcaaaagtgacttttgtaaatttgacaattacaaataccacaagttacagtataaatactgaaggaaaagttaatttaataaattgcacatttaaaaacattctcggaagagctattaacaatacaggaattttagaattacttaacataacatttaccacagattcaatttatcaacaccctaaaataactaatttaaaaagcaatttaaataactctttaatctacaacaagggacttttaaaaatagaaaattgtacttttaagcagatttcccttcaaaaccaaataataacaaataaaaataacataacatgggacagcataatctacaacgcagaaaatgcaaatttaaccatcaacaattcaaaatttaccaacattgaaaatagagttattaagaataatggaagactgattattgttaattcttcttttgaaaataaaactaaaattcatattaatataattatcaatgatacttatcaagaattatcaaataattacatatatcaaacatatcgagaaaaagctattaaaactataaatggatcaataatatacaattctaatttattaacaattgaaaactcaagttttaaaaacattacagacattattaacaatatagattatataggcattaaaccagctcctacagacttttttggaacaacaggatggtttggaagtaatggtggtgcaatatataatactggaacttttcaaattaaatctagctcatttaataatgtaaaaagcaaaactggaggtgcaatatacaatataggttttggaacaattgaaaattcaacatttaaccacataaattcaacatctggaactggaggaacaatatacaacacaggtcaattaattataaccaccaccaccatctctaattccaaatcttcaagtaatggcggtgcaatatatagtgaaggaaatttaaatataagtaatacttctataagtttatcagcaggataccatggaggtgcaatatataatactgggaacatttacctatggaattccttgataaataaaactaaatccacatataatggaaatgccatacaaaattctggaaacatgcatttaaataatacaataatatctaatataaatggatataattcaatatataatgatgaatcaggaacaggaataataattaattcaataattaaaaataacaaaatttactcaaaaaacggttataataccaaagtttattatgggtcaattgaaaatttaggtactctcacaattaacagaactatatttaacaataatagttatggagataataatttttattatcttacaggtgcatttaatatctataataaaggtactataaatgcattttataacatgtttattaatacaaaacacctacaagcaaccagtcccgccccctacataataccaaaagatccatatgcattcctatttaatgaaggcactataaatatggattacaactatttttgtacaaatgataatccttatccaaaagattcaaactctgaaatagataattattttatattcacatttaaaccagaatatggatctttacaaattggagatactattcaacttaaagtagatttaaaactagctaatggaaaactatttacagattataacttacttcctgaaatgaatgttacatttacaactataattgatggaaaagaagtaaatataactaaacctttaataaatggaaccgcctcattagactataattacacctctcaaaaaggccaatacaaagtttatactaatttaggaggacacacagaagaaataatccttgatgttggaaaagaagattctaaaatagatgtggatttcaataacaacattatctacggtgaagatgcaatatttaaaattaaagtaaacggaaactacacacacatcccaactggaaatgtaacagtcattattaacgataaaaaatattccataaacctagtaaatgggtcaactaatttaaaagtttctgatttaacacctggaaattacactattaaaataatttacgaaggtgactcagattatgctaaagtcttctattactgcaattatactgtaaataaacatccaactacattaaatattactgcacctgaagttaaaatcgggcaaaacggagaactaattataaatcttgaacctaaaggttcccaaacacaaggttacctgtacatcaatggagaacttaaacaaataatttatatttatgccggaaaaactacaattccacttaaaaactttgctgttggagaatataaccttacagtagttttatgggattcaaaatactatgaaagcagcaatgcaagtacaatttttaaagtaagtaaatttaacactaatttaacaataaatgtagatgatgttaaagctggagaagatgcaacagctacaataactgtaaatccaagcaatcttcgcggagaagctatactctgtgtaaatggcataaatactacaatatttttaaaatcagaagtaacaaacatcacactacacaatttaactagcggaagttataatgtaactgtttattatcccggagactccaaatacgccccatcaactgcaacaacaacatttaaagttctaaaagattcatgcaatctaactgtaaatattacatataacaatgatttaaccggaatcatcaatgtaaaaactaatcccaacacctgtaccggcgaagttggagtttatatcaataaagaattctataaattaactctcacaaacggaacagctgtatttaatgttaatttcacaaaaggaagcaattacatttatgttttataccttggagataaacagtttgaatctgcaagctggaataccacaataaacataacaagcattgattttatattaactggtgaaaatttaacaatcaaagagcaggataactcaatatatcactttaatttaacagacaaacaaggaaatccttacacctatacaaaagttgaaataaacatagataacaaaaattacacagtaatgacaaattctaaaggtttaggttatcttaatttaaatttaaaagcaggagaatatatccttaaagcaacattcaatggaattacagccaaaaacaaaattattgtaaaaccagcagatttaaatattgacattaaagacattttagccgagaaactgaagtaattactgttaaattacctgccaatgcaacaggaactatattatttgttatagatggtaaaacttacaataaaacattgaaaaatggaactgcaagtgttgaaatagctaatttaaccttaggaaaacatacattaaaagtaatttactcaggagattccaactataccaataacacaaaagaagttgaattcaatattaaaaactcattatccaccattacaatcaatacaattaaagacagcatctatggagaatccattactataacagccaacattacaagcggtgcaaatggaaacgttacttttactattgaccatgactcaaaaactgttgaaatagtaaacggagtagccaaagttacattcaataaagtcaatgcaggaaataaaactgttaaagcaacctacaacggaaacaatatttaccaaggctcctctgacaccaaagaatttaaaatagctaaagcaccttcaaatataaacattataacttcagaaatcatagaaggccaaaatattagaatatatgcagtagtaaatgatgatgctacaggtaatgttacatttagaattttaggattatattcaccaagaaataaaaccatcagcaacggtaatgcatcatggttaatttcaccattaacaagtggatcatacaccataaatgcatattataatggagataataattatttaagttccaatacaactaaaatacttgtaatcaatcaaacaagaagtatattgaaagttaatgttgaaataggtgaaaatgaaataatatttagtgcaactcttaaaacagaagatggaagaccaattacaggtaatgtaactttagagcttaataaagagttctataaaatagtaataactgatggtgttggttttagaagctttgataaacttccagagggcaaatacacatattctgcaacatataaaggaactgataaaatttctcgagctactgacaacggaacttttgaaatcaaatctgttgaatataatgttattttaaatgctcctgatgttaaaatgacttatcatgacggcacaagattcatagctactttaactgataaacagggaaatcctataagagatgctgcaattgaaataacaattaacggaaaaacctatactaaaacaacagatgaaaaaggtgttgtaagtttaggattgagcttggacagtggaatatacacagtaactgttaactttaaaggattattaaactatactccgataaccaggcaggcgaaagttactattgaaccgacagttaaaggattggacgttgttaaaatgtttagaaacaatactcagtattatgctatatttactgattcacagggaaatcctcttaaaaacaaagatattcagtttaatatcaatggtgtcttttacactaaaaccaccaatgataaaggaatagctatgatgggtattaacttaaatcccggcaaatatgttataacagcaattaaccttgttactggtgagcagtcaggtaataatattactgtaaaatcactgattgttcaaaatgatttaactaaatactatttgaatgcttccagattccagacaacaatctacaacaaagacggatcattagctgcaaacaaggaagtaacctttaacatcaacggtgtattctaccacaaaaaaacagatgaaaacggtattgcaagcatgggaatctctttaagacctggagaatacataataaccacaatggttgacggattaagtataggaaacaaagtcaatgtattgccgacattaattactaaaaacttaaacatgaaatacctggacggaagcagcttcactgcacaaacattagacggtcaaggcaaaccaatagctaaccaaaacgtatcatttaatgtaaacggagtattttaccacaaactcacagacaataacggtattgccaaattaggaatcagactgatggccggtgaatacatcataacttcctactggaacgacttccaaacaggaaacacaataaaaatagaataa

SEQ ID NO: 62 - protein, 2036 aa, Methanobrevibacter smithii
MKNRKIILILILGLFFIALSNVNAEDNSTVTLNHSNTEDIGISEADSTIDTDESNQNSADIVKIKDYNQKYTSIDNTNKVGENVYIGSKYPSIENTITVNDTSEFNKTGNITVNIHVTGKFTMGEKEFNKTYLIIYENNTIISQKTLNELNLPPYQHFTTPGNYTFDISFPYHVQDKSRLQVYIFGIFSNTIVFEKLNKIQLTNLTNNNIIIDNKIKSNNNWTNSINSIKKALDLVENEGTIYLSNLNIIHDQNENILINKSVTIIGNNVTFNGFEKESLFNITNNAKVTFVNLTITNTTSYSINTEGKVNLINCTFKNILGRAINNTGILELLNITFTTDSIYQHPKITNLKSNLNNSLIYNKGLLKIENCTFKQISLQNQIITNKNNITWDSIIYNAENANLTINNSKFTNIENRVIKNNGRLIIVNSSFENKTKIHINIIINDTYQELSNNYIYQTYREKAIKTINGSIIYNSNLLTIENSSFKNITDIINNIDYIGIKPAPTDFFGTTGWFGSNGGAIYNTGTFQIKSSSFNNVKSKTGGAIYNIGFGTIENSTFNHINSTSGTGGTIYNTGQLIITTTTISNSKSSSNGGAIYSEGNLNISNTSISLSAGYHGGAIYNTGNIYLWNSLINKTKSTYNGNAIQNSGNMHLNNTIISNINGYNSIYNDESGTGIIINSIIKNNKIYSKNGYNTKVYYGSIENLGTLTINRTIFNNNSYGDNNFYYLTGAFNIYNKGTINAFYNMFINTKHLQATSPAPYIIPKDPYAFLFNEGTINMDYNYFCTNDNPYPKDSNSEIDNYFIFTFKPEYGSLQIGDTIQLKVDLKLANGKLFTDYNLLPEMNVTFTTIIDGKEVNITKPLINGTASLDYNYTSQKGQYKVYTNLGGHTEEIILDVGKEDSKIDVDFNNNIIYGEDAIFKIKVNGNYTHIPTGNVTVIINDKKYSINLVNGSTNLKVSDLTPGNYTIKIIYEGDSDYAKVFYYCNYTVNKHPTTLNITAPEVKIGQNGELIINLEPKGSQTQGYLYINGELKQIIYIYAGKTTIPLKNFAVGEYNLTVVLWDSKYYESSNASTIFKVSKFNTNLTINVDDVKAGEDATATITVNPSNLRGEAILCVNGINTTIFLKSEVTNITLHNLTSGSYNVTVYYPGDSKYAPSTATTTFKVLKDSCNLTVNITYNNDLTGIINVKTNPNTCTGEVGVYINKEFYKLTLTNGTAVFNVNFTKGSNYIYVLYLGDKQFESASWNTTINITSIDFILTGENLTIKEQDNSIYHFNLTDKQGNPYTYTKVEINIDNKNYTVMTNSKGLGYLNLNLKAGEYILKATFNGITAKNKIIVKPADLNIDIKDILAGETEVITVKLPANATGTILFVIDGKTYNKTLKNGTASVEIANLTLGKHTLKVIYSGDSNYTNNTKEVEFNIKNSLSTITINTIKDSIYGESITITANITSGANGNVTFTIDHDSKTVEIVNGVAKVTFNKVNAGNKTVKATYNGNNIYQGSSDTKEFKIAKAPSNINIITSEIIEGQNIRIYAVVNDDATGNVTFRILGLYSPRNKTISNGNASWLISPLTSGSYTINAYYNGDNNYLSSNTTKILVINQTRSILKVNVEIGENEIIFSATLKTEDGRPITGNVTLELNKEFYKIVITDGVGFRSFDKLPEGKYTYSATYKGTDKISRATDNGTFEIKSVEYNVILNAPDVKMTYHDGTRFIATLTDKQGNPIRDAAIEITINGKTYTKTTDEKGVVSLGLSLDSGIYTVTVNFKGLLNYTPITRQAKVTIEPTVKGLDVVKMFRNNTQYYAIFTDSQGNPLKNKDIQFNINGVFYTKTTNDKGIAMMGINLNPGKYVITAINLVTGEQSGNNITVKSLIVQNDLTKYYLNASRFQTTIYNKDGSLAANKEVTFNINGVFYHKKTDENGIASMGISLRPGEYIITTMVDGLSIGNKVNVLPTLITKNLNMKYLDGSSFTAQTLDGQGKPIANQNVSFNVNGVFYHKLTDNNGIAKLGIRLMAGEYIITSYWNDFQTGNTIKIE

SEQ ID NO: 63 - DNA, 4293 bp, Methanobrevibacter smithii
gtgttgatttgtagtattggtgcagttaatgcaactgatttagatgataattctactgttgaagtttcttctgatgtagatgatagtatttcagttgatgaggtaccaattactgatgatgttgaacaaagtcaggatgtggctagtacaaatgctgctacttgggatgagttaaaaacagcttgtcaaagtagtggtgataaagttattacattaactggtcaatcttataatgcaaatagtcaaattgtttttggaaatagtgctactatagttggtagttctgatagttatatcacattatcaaatgggaatcttattcctttcttaaattctaattctgaactttccattacttttcttaatgtaaattttaaagacagtaattgtgatatgttagttcaattatgtggtaatagtaaactagaaaattgtacatttgacaatattactgtaggatctaaccataaatctgtgctttataatacttatggaagtatggaggttattggttgtaattttactgattgtacaagttcttttggtgttataacaaattataatccaagttctacaacaaatgttcttatgaatgttgaaaattgtaattttataaacaatgttgctacttatgctccaggtgcaattaataattgtggtattttgaatgtattaaattctaattttgtaagtaattctgctagatattgggcaggtgctattcatactcattgtaatgcatatactagaattttaaattctgagtttaagagtaatactgcaggatggaatggtggagctttatactcttacagtaaattagaagtgtataattctacttttacagataataattgtactactaataatggtggaggagcaataggtgcatttaattatatctccacatataatgttacagttgaaaattgtatatttaaagataacaataatttatgcggtgattttactaatgaatctacaacttctttaggtcgtggaggagcaatttctgtattaaatggtggatatttaaatgttcatgattctacttttgtacataatggggcagtaattggtcaagctatttgtgcatataatacaaattatgataattctactggaggaactccaaatttacaaatttataataatgaatttataaatcatacaattaccacaaacgatactgtatttatttcagagggtaattatacatttagaaacaatacctttactaacagtcctcaaactattggtacagatagcaatataattgaaagcaataatgttaatttattaaaatctcttaaaattagatctattgttttcaatcaaccaatttctgattttaatactgttactcaaaatcaatgggcaatgagtggatatgataatcataattctgctaatgttccatatattggtgttactacaaatccaaatatttggaaaaaggatgttggtggagttgtatctggtttagtaattgatgaagacggtactttttatttgattgcagggtctaatgtcactgcttttgattctactggttttttaaaatggagtaaaaatttaggtcaagttacaatgcctggattagcattagataatcgtggaaatataataatacctgttaaagataatcgtcttgtaatattaaataaaactactggtgcagatttgggcggaaatattttccaagcatctagtgcatatgctcctatgttggatgatgatggaaatatttatgttgtaggtcaatatgaatatgataatggttatgtgcctattgttaaatattataacagcacatcttataatcctaatggtggttatgattatgtatataaaagtttattcaatacagcagttagtactattccagttttagataataatggagttttatgggcagtaagtggtactaatttagttgctgttgatgttaaaactggaaatcaagttgctagttattctgattgttattctggtattcgtcctattgtaggggaaaatggtattgtatattttgttaaaagtgatagaaaagcagtatatgcagtatctgtaaatggttatttatggaatacatcattacctacttatcagctttttggtacaaaatatgaacaggctactgcattaggtattgataatgaaaaaaatattttatatgttggaacatctagggcaattaacaaaatagatatgacaactggtattctaactgtattccgctcaggttttgacatggttaatagtataattattgatggtaatggtacattatatactacaaagactaaccaaggttcattgtgggcattttattcaaatggtacacaagcatggagtaaaaatatgggaggctctttaaaactacttgcaatggataaaaatggtaatatttatacaagttataataattacttatgtgttttatatgctcaaggagtagaccctaacatgacaattgatgctaaaaatatcttggcaaatgaaaacacagatattgtagtaaaattattggacggagtatatggaaatgttgtatttacaataggtaaggatacatatacagtagctattgaaaatggttctgctaagttaaatattggaaatttaagtgttggaagttataatgtgactgcaagttttgcaggtaatattaaatatgcagctagtgaaaataatgcttcttttatagtatctaaagtacctacaaatatgaatattgccgtagataatattaatgttggagaagatgcagttattaacataactcttcctaatgaaatttctaatgaattggttagtgtaactattgacggtaaatcctatactgtacttatcaataatggtaaaggatctttaattttatctaatttagtagctaattcttatccaattacagctaaatatgatggaaattacaaatatactgaaggtgaaaacagtactactttaactgtggctaaaatgtcttcagctgtaaatgtcacagctaataatatcaaatttggtgaggaagctgttattaacattgctgttcctaatgtatctttaggtgtagctactgttgttgttaatggtaagtcttataatgtggctattgttgatgaaaaaggtgtcttaaatatttataacttagctgctggtgattataatgttgatgtaacttacttaggtgataataaatacctttcaagtacaaatgctgctaatttcactgtttccaaagtgtctgattataatatgactgttgatattgcagatattgttaaaggtgaaaatgctacaataactgttagtgttcctgaagacggaaccggaagtgtaattgtaacaataaacggaacagattacaaaggaacagttattaaaggcattgctaaagttattatcccagatttagatgaaggaacctacaaagttgtaacattctacactggagacaacaaatacgattccatgattgttaacggaactataacagttaataaaaacacaataactacattaataatgaatgatgttgtcaaatacttcagaggttctcaaaaactcacagctaaacttgttgatgcaattggaaatccaatagctaatgcaactgtttacttcacaataaatggcagggtttatgctaaaatcactgatgaaaacggtatggcttcaatgggtatcggattagttcctaatgaatacaaagtaagtgcagtatttaacggaacaaaagaccatgacaaatcaacagctaatgcaacagtaactgttaaaagcacaattttaggaaatgacactacattatacttccttaatggaacaaaatatgtggctaaattcttagacagtgatggaaaagcattaacaaatactactgttaaatttaacattaatggtgtgttctacactcgcgtaactgatgaaaacggtatggctagtttaaatattagactaaaccctaaattatatatcataactgcttacaatccagtaactggtgaacaaagagctaatgaagtaactgttttaccaagaatcattgctgaggatctctccatgaagtatcttgacggcagttcatttaacgcaacacttgttgacggtcaaggtaaagcagtagcaggtgtaaacataacatttaatgtaaacggtgtattctatcataaaacaaccgatgcaaacggtgtagctagattaaacatcagattaatgcctggcgattacatcataacatcaacatatgacaaatgctgggcatcaaataaaataacaatttcagcttaa

SEQ ID NO: 64 - protein, 1430 aa, Methanobrevibacter smithii
MLICSIGAVNATDLDDNSTVEVSSDVDDSISVDEVPITDDVEQSQDVASTNAATWDELKTACQSSGDKVITLTGQSYNANSQIVFGNSATIVGSSDSYITLSNGNLIPFLNSNSELSITFLNVNFKDSNCDMLVQLCGNSKLENCTFDNITVGSNHKSVLYNTYGSMEVIGCNFTDCTSSFGVITNYNPSSTTNVLMNVENCNFINNVATYAPGAINNCGILNVLNSNFVSNSARYWAGAIHTHCNAYTRILNSEFKSNTAGWNGGALYSYSKLEVYNSTFTDNNCTTNNGGGAIGAFNYISTYNVTVENCIFKDNNNLCGDFTNESTTSLGRGGAISVLNGGYLNVHDSTFVHNGAVIGQAICAYNTNYDNSTGGTPNLQIYNNEFINHTITTNDTVFISEGNYTFRNNTFTNSPQTIGTDSNIIESNNVNLLKSLKIRSIVFNQPISDFNTVTQNQWAMSGYDNHNSANVPYIGVTTNPNIWKKDVGGVVSGLVIDEDGTFYLIAGSNVTAFDSTGFLKWSKNLGQVTMPGLALDNRGNIIIPVKDNRLVILNKTTGADLGGNIFQASSAYAPMLDDDGNIYVVGQYEYDNGYVPIVKYYNSTSYNPNGGYDYVYKSLFNTAVSTIPVLDNNGVLWAVSGTNLVAVDVKTGNQVASYSDCYSGIRPIVGENGIVYFVKSDRKAVYAVSVNGYLWNTSLPTYQLFGTKYEQATALGIDNEKNILYVGTSRAINKIDMTTGILTVFRSGFDMVNSIIIDGNGTLYTTKTNQGSLWAFYSNGTQAWSKNMGGSLKLLAMDKNGNIYTSYNNYLCVLYAQGVDPNMTIDAKNILANENTDIVVKLLDGVYGNVVFTIGKDTYTVAIENGSAKLNIGNLSVGSYNVTASFAGNIKYAASENNASFIVSKVPTNMNIAVDNINVGEDAVINITLPNEISNELVSVTIDGKSYTVLINNGKGSLILSNLVANSYPITAKYDGNYKYTEGENSTTLTVAKMSSAVNVTANNIKFGEEAVINIAVPNVSLGVATVVVNGKSYNVAIVDEKGVLNIYNLAAGDYNVDVTYLGDNKYLSSTNAANFTVSKVSDYNMTVDIADIVKGENATITVSVPEDGTGSVIVTINGTDYKGTVIKGIAKVIIPDLDEGTYKVVTFYTGDNKYDSMIVNGTITVNKNTITTLIMNDVVKYFRGSQKLTAKLVDAIGNPIANATVYFTINGRVYAKITDENGMASMGIGLVPNEYKVSAVFNGTKDHDKSTANATVTVKSTILGNDTTLYFLNGTKYVAKFLDSDGKALTNTTVKFNINGVFYTRVTDENGMASLNIRLNPKLYIITAYNPVTGEQRANEVTVLPRIIAEDLSMKYLDGSSFNATLVDGQGKAVAGVNITFNVNGVFYHKTTDANGVARLNIRLMPGDYIITSTYDKCWASNKITISA

SEQ ID NO: 65 - DNA, 4113 bp, Methanobrevibacter smithii
atgatatttattattaatcatatcgctataaaatatgaggtaaataatatgaataagaaaataatattaattttaataagtattttcgtgttatttgcatttgcacaaggcattagtgctgcagatatggacaatagcactaatgcaataagccaggcagaaacacatgaagtactaggaaccacatatgttgtcgatggttctgcagaaaatcaaatgaacgacccgacaatacagactgcaataaataatgcaaaagctggagacaccatagaaattactggaaaaaactatgaacactgccattttgtcgtagataaaaaattaaatatcataagtaatgtaggaacaacaatgtctacatgcccaagtaatattaaaggatcaaatggtgttgggatattttacttcagcccagaggcatcaggatctgttctttcaggatttacttttgtaaatgatgctgctaaaaacggagaagttgatccgtatgcagtttatattgaaggtgcaaaagatattcagataactaacaatataatagaccaggtaaccaatggtcctggaatatatataaaagatgcttcaaacattacaattaacaataacaatatccaatattcccaaaatggaatattaatagaaaataataataaaattactataaaagacaatgatattgaaaataataaaaattccggaatttacattggagaaggcaataaaaatatcaacataataaacaacaacattgtgaaaaataattggaaaggtgttgttgttaattctgcaaataatgtgaacataataagcaatgtcattatggcaaatagggacaatcctgttcaagcaagagcaaaaaacggagcaggaatatatgttgactgtgcagtagatagcttaaaaataaacggcaattacatttttgaaaatggaaattacggaatatttgatacttacaaaactaaagaaagttttgaagaaaactataaatcacaggaaattaacttcaacatttttgtagggcataacactagaggaatctttgcacagcaaaatgaagctggacaaaccggaatcatttatgttggaagcaatgcatattcctttgaacagctttgtccaagtacattctatgaacctggaatattaaaagacggtacacaggatatgatatttggagaaatgaccaaaatatcaaaaggcatatataaaataacctttattaatgcaaaaaccggtgaagtagtaaaatgtttaagtgccggaaatgtaactttcttcttaaataaagaaggaactgacagcagcataaaaccgggagatacatatcaaattgtatcaataataaatggaactgctactgtaaactttaaaaatgctacttttaaacctacccaaaatgtattgattgctcttggacctggatacggtacaataagccaaactaatacttcaacaagaccatgtgcatactataatatacctgattccgacattccgtcaaatgatactaaaagtagtgatttaaccatccaaaatacaaatatttactacggaggaaaattaatctacattttaaaagacaatgatggaactgcaattgcaaatgctaatattagccttacaatcaatggtaaaacctacaataaaaccactgataaagatggaattgcatatatgaacatcaggttggtttccagcaaacaatacaatgtaactgcaacatatgcaggaactgatgactacaagggaactacattaaatagcacaataacagtaattccaacaattactgcagaagatgttgaaaaaatctttagaaatcaaactcagtactatccaaaacttacagacagtaacggaaacccattaaaagatacaaaagtaactatgaacattaatggagtgttctacaccaaaattacaaatgagaaaggaatagccactcaaaacatcaacttacttcccggaaaatacataataacaagtacaaacacagcaactggcgagtcaatctccaacacaattattgtaaaacctaatatggatcaaaatactgatttagtaaaatactacaaaaacggcacacaatacaatgtaagagctcttgacggacaaggaaacccactagctaaccaagaaataacattcaacatcaacggagtattctacaccaaaaccacaaacgacaaaggaatagccactcaaaacatcaacttacttcctggaaaatacataataaccgcaatatacaacaactgctttgtttcaaacaacatcacagtattgcctaacatggatcaaaatactgatttagtaaaatactacaaaaacggcacacaatacaatgtaagagctcttgacggacaaggaaacccactagctaaccaagaaataacattcaacatcaacggagtattctacaccaaaaccacaaacgacaaaggaatagccaccctaaacatcaatttacacccaggaaaatacataataaccgcaatatacaacaactgctttgtttcaaacaacatcacagtattgcctgtattgactgctgatgatttaacaaaatactttggaattcctgcttcattaaattcaaaattagttgacgggcaaggcaatcctttagctaatcaaactgtaacttacaacatcaacggagtattctacaataaaattactgatgtaaatggaatagctaaattaaatattaacttaaatcctggagaatatattgcaaccattacacatgaatcaacttttgcaagtgccaaagtcgttgttttaaatccgcaagtagttaaagaaaatgctacaaacagcgaaattcaaaatattataaactctatcgataataaaggtgctgttaaattcctaggtaaattttacaatgatatttccctagacattacaaaaagcatcattcttacaagtgatgtcaacaccacattaaacggaaaattaaatacctgtgttttaaatattaaagcagacaatgttttagttaaaaacttaaatattaatggaaataatgtgtctggaattgtagttaataatgttaaaaatacagtcattgaaaataacaacattaacaacttattaaataaaagcaatatggacaactataactctggtaaaacattacttcctggaaatggtattgcactgttaaactccaaaaacacagtcattgaaaacaacaacatccaatattattacaatgggatttacttaaatggtgcaaaatacaccaccattcaaaagaacaccataaccaaaaacaatttcggtgttgaatttgataagggtgcttcaaacaccttaattaatgacaatgacattattgaaaatattggttttaaaaccatgacaatgattgaaggtccttatggatacggaataagcatgaggcattccggagtaaatgtaactgtaaccaacaatagaattaataataactacatgggagtatttattgatgctaaaaactgtagcggaattgtaattacaggtaatgaaatttcaaacagtaccattgaaggtttaactgtaaatgaaaactacacctatgctccaggagctgttcttgttgtagaaaataatgccatttacaataatgctaaaggaccaagccaaataattctgggagaagttagtgctaaccctaatggaatttatggaccgggtgaatggaatgacaccttaaaattagaattaggacctaactggtacggaacaaacaggtacacaacctggggattaaatcaaaccgggcccggaacaatctgtcctaggattcatactaccctaattccatacaacataagctgcatttcccctggaaaatacgaagtaactttctacaataatggcagcatagctagcaaacttcccgatttaacaacatactttgtattaaactataatactgataaagaagaagtagtggaagttgttgtacaccaaggaaaagctacctttgagttttcaactaaaaattatgactcatcaaacaatattatagaaggattttcagtatttgatccaaataggccaaaaacagtaatatacacttataatgttcccgaaagtgaaattccaaaatag

SEQ ID NO: 66 - protein, 1370 aa, Methanobrevibacter smithii
MIFIINHIAIKYEVNNMNKKIILILISIFVLFAFAQGISAADMDNSTNAISQAETHEVLGTTYVVDGSAENQMNDPTIQTAINNAKAGDTIEITGKNYEHCHFVVDKKLNIISNVGTTMSTCPSNIKGSNGVGIFYFSPEASGSVLSGFTFVNDAAKNGEVDPYAVYIEGAKDIQITNNIIDQVTNGPGIYIKDASNITINNNNIQYSQNGILIENNNKITIKDNDIENNKNSGIYIGEGNKNINIINNNIVKNNWKGVVVNSANNVNIISNVIMANRDNPVQARAKNGAGIYVDCAVDSLKINGNYIFENGNYGIFDTYKTKESFEENYKSQEINFNIFVGHNTRGIFAQQNEAGQTGIIYVGSNAYSFEQLCPSTFYEPGILKDGTQDMIFGEMTKISKGIYKITFINAKTGEVVKCLSAGNVTFFLNKEGTDSSIKPGDTYQIVSIINGTATVNFKNATFKPTQNVLIALGPGYGTISQTNTSTRPCAYYNIPDSDIPSNDTKSSDLTIQNTNIYYGGKLIYILKDNDGTAIANANISLTINGKTYNKTTDKDGIAYMNIRLVSSKQYNVTATYAGTDDYKGTTLNSTITVIPTITAEDVEKIFRNQTQYYPKLTDSNGNPLKDTKVTMNINGVFYTKITNEKGIATQNINLLPGKYIITSTNTATGESISNTIIVKPNMDQNTDLVKYYKNGTQYNVRALDGQGNPLANQEITFNINGVFYTKTTNDKGIATQNINLLPGKYIITAIYNNCFVSNNITVLPNMDQNTDLVKYYKNGTQYNVRALDGQGNPLANQEITFNINGVFYTKTTNDKGIATLNINLHPGKYIITAIYNNCFVSNNITVLPVLTADDLTKYFGIPASLNSKLVDGQGNPLANQTVTYNINGVFYNKITDVNGIAKLNINLNPGEYIATITHESTFASAKVVVLNPQVVKENATNSEIQNIINSIDNKGAVKFLGKFYNDISLDITKSIILTSDVNTTLNGKLNTCVLNIKADNVLVKNLNINGNNVSGIVVNNVKNTVIENNNINNLLNKSNMDNYNSGKTLLPGNGIALLNSKNTVIENNNIQYYYNGIYLNGAKYTTIQKNTITKNNFGVEFDKGASNTLINDNDIIENIGFKTMTMIEGPYGYGISMRHSGVNVTVTNNRINNNYMGVFIDAKNCSGIVITGNEISNSTIEGLTVNENYTYAPGAVLVVENNAIYNNAKGPSQIILGEVSANPNGIYGPGEWNDTLKLELGPNWYGTNRYTTWGLNQTGPGTICPRIHTTLIPYNISCISPGKYEVTFYNNGSIASKLPDLTTYFVLNYNTDKEEVVEVVVHQGKATFEFSTKNYDSSNNIIEGFSVFDPNRPKTVIYTYNVPESEIPK

SEQ ID NO: 67 - DNA, 2304 bp, Methanobrevibacter smithii
atgaaaataaacaataagattttagtatcattattgattgtccttattgctgctgtttcactttctgctgtttcagctgcagatgatgctgctagtactgtagtatcttcccctgcagaacaagttgaagctgtagaaatttccagcatcgatatgggcggagtaataaatgaacctgctacagaatctaaaacctggaatgtaaattcaagtgcaacttacgaagatgtacaaaaaataattgacaattcacaaagtggagataccattaacttcaccaaagatgctgtttacaactggcatagttctgaagtattaagtgctataactattccacatactttaattattgaaggaaacaatgctactattgactgtgacaatggatttatagctaacagtaaaagtgctagtgttgaaggaactgttttccaaaacattaacttcaatataaaacaagcaaacttaataaacggacgtggaattgatttatccggtgtaactaatattaaagttattaactgtactttcgcaaacggtaatgcaggagtaagaaccagcagctgttcagacattacagttgacggatgttcatttattggaactactgatgtaacaaccattggtaaaaaagaaataggtaccaaagcagtagctattatgggtggatccaaccacaaaatactaaacaattactttggaaaagatttacttgacggagtatccattgcaagtaactctaaaaacaacttccaatttattaacaacacctttgaagaaaactggtacggtgtattctacggaggaggagtaagaggaattgttgttcaaggtaacactttcataaacaacaaagtttatgacttaggacttgttaaagctgctggtgaaaccaaaataataaacaacactttcattactggaaattattccgtaacagcaaatggaaaaaccatcgctggaacctgtactcctatctacatagaacaaggtaacaccgaacacggttatccaagtaacattgaaactattaccattcaaaacaatatatttaaagcttacaacaacaccaacccttacaccatcgatgctgtccatattcaaagtaacggtggtcctttactccctctcggaaccataactgttgctgacaacacttatgaaaaaggaatcactcctgtatcattcatggataaaaactgggaaggtgacaataatacttacattattagccctataactttagacactaccgtaaaagcaccaactactgcaataactgttggtgactcaatcactatgcaattacttgcagcaaacggtattactatccctaatgcaaaagttaccattaccgctaccagcggagacataaccaaaactatcgaagctactactgatgcatttggtttattcactgttgaaggattaggcgttggagactggactttaaacattgcttatgcaggaaccacaacaagtaccaacggatacatatacggtgcatccgaatccaaagtaaaagtaagcgtatccggtaaaaccgctttaaccattaaagacactaccatcattaaaggtggaaaacttatttacactttaactgatgcaaacggcaaagctattgaaaatgtaactgttacattaaaaataaacggaagagaatacacaaaagtaactgatgaaaacggtaatatcttcatgggcattaacctccaacctaacgattacgcaattactgcaacatgtaaagttggaaatgataccataacctcaaaagatgttattactgtaacttccaacatcatcactaaagacattactttatacttcagaaacggtacttctttcgaagctactattttagatggtgaaggaaaacctgttggagaaggacaaagtgtaactttcaacatcaacggtgtattctataccaaaactactgatgaaaatggtatggtaaaattaggtattaaattattacctgacgaatatatcattactaccatttacggaggtattcaaatatccaacaaagttactgtactctcaactttagaaaccagcgacttagaaatgacttacggtcaaaataaaagttttgttgcaaaaacattagacggacaaggtaaagtattagctaaccaaactgtgaaatttaatattaacggtgtattatacacaaaaacaaccaacgaagctggtgaagctagcttaaatattagattattaccaggccaatacatcattacctccgaatataacggttatcaagttggtaatcacgtaactgttaaccaataa

SEQ ID NO: 68 - protein, 767 aa, Methanobrevibacter smithii
MKINNKILVSLLIVLIAAVSLSAVSAADDAASTVVSSPAEQVEAVEISSIDMGGVINEPATESKTWNVNSSATYEDVQKIIDNSQSGDTINFTKDAVYNWHSSEVLSAITIPHTLIIEGNNATIDCDNGFIANSKSASVEGTVFQNINFNIKQANLINGRGIDLSGVTNIKVINCTFANGNAGVRTSSCSDITVDGCSFIGTTDVTTIGKKEIGTKAVAIMGGSNHKILNNYFGKDLLDGVSIASNSKNNFQFINNTFEENWYGVFYGGGVRGIVVQGNTFINNKVYDLGLVKAAGETKIINNTFITGNYSVTANGKTIAGTCTPIYIEQGNTEHGYPSNIETITIQNNIFKAYNNTNPYTIDAVHIQSNGGPLLPLGTITVADNTYEKGITPVSFMDKNWEGDNNTYIISPITLDTTVKAPTTAITVGDSITMQLLAANGITIPNAKVTITATSGDITKTIEATTDAFGLFTVEGLGVGDWTLNIAYAGTTTSTNGYIYGASESKVKVSVSGKTALTIKDTTIIKGGKLIYTLTDANGKAIENVTVTLKINGREYTKVTDENGNIFMGINLQPNDYAITATCKVGNDTITSKDVITVTSNIITKDITLYFRNGTSFEATILDGEGKPVGEGQSVTFNINGVFYTKTTDENGMVKLGIKLLPDEYIITTIYGGIQISNKVTVLSTLETSDLEMTYGQNKSFVAKTLDGQGKVLANQTVKFNINGVLYTKTTNEAGEASLNIRLLPGQYIITSEYNGYQVGNHVTVNQ

SEQ ID NO: 69 - DNA, 1950 bp, Methanobrevibacter smithii
gtgaataatttaaaagggggtgaaaatatagttaaaaaagtgtttttcatttcaattttaatattctttttggcaataaacattgtagctgctgaagacagtgataatgctacagctgatgcatatgataagtctcaagtagaaaatgttgtattgcagaatatagaaatagataatgttcgattaaatacatctgatgtgtcagtattttctaaaggtgaattttataatgctacccttacttatgatgatggaactccagtttttaataaaacaatcacttttgatgttaatggagtcaaatacaataaggtaaccaacaatcagggtattgcaagtttgagcatacgattaaatcagggaacatatgttatttccactagttttacagattcttatgacagaattttaactcactacaattatgtctatgtgtctgatgttaaaggaactgttattccagagggattgtccaatattgaaattcaaaaaatccttgattctgcaaatgcgggagataatataatttttgcgggtaaaaactatgaaaatatatcattgacaatatctaaaaaccctgttaatatttacagttcagttaaatctactttaaatggaaattccaaaagcccagtttttacaattgaatcatctaaagctgcaggaactgttatttataacttaattattcaaaacggttctgaaggaattttattgaagggaactaataatattacggttcttaataatgatataactaaaaatagtcgtggcattagtgtaatcggtacagataaatcaaatattattggaaatttaatttccaattcaaaaagttttggaatttatcttaaagattcaactaatactcttatctactctaattgtattactaaaggtggaaatggtatttattttgacaatggtgtaaaatatacaactattgaacataatcaaatatcatacaacaaaggatatggaataaatctccatgggtcaggaccttacacaaacataactgacaataatgtttcaaataatgattatggaatcaatattgattgtaagggtgattctgaattatatatcactaacaatgcaattcataataatgacgtaggtcttaacatcggtgaaaattatgtaagatccgatgaggagggattaactggtgtcggatacaattttataggtcttaataatgaatttaatattgcagctaaggaaaatgataattaccctgcttttaagatgggtccggtacttactgatgggaatgatgaaccatttattaagatttgtaataaaataaaaaccgaattcttaagttttgatgttaagcaaattgataaaggttctatacttgtatctgtagacagcaaaatcaccacagctattccatggaaagtttcagttaataatggcggtaactggggatatatggaaattaataacggaaatggtattttgcatgtcaataatggtgacggtattgtaaagttcggttattatggcagttctggtcaggaaacttataagttatctgattacgaagcgtatattaaaccaaattatcctgttccaccttctaatcctacaaaccaaaatacgaatggaaatggaacttcatctaacacacagcaaggtcaaagttctgcaactacttctggaggatcaaatgacggttctttaagtgtggctggggctaattcagtatcagcatcatctgctcaatgttctgcttctgcaagtgactctggttctagtgatggtgcttcttcttctgcatcagctagttcttctcaatctgttgcaaaggttatagatattgatgaagaagttgtaagaattgcaggaataagtattttaatattattaataatagctgtcattgctttgtattataggaatgatataaaatccatgattgaaaagaaaaatggcaaatag

SEQ ID NO: 70 - protein, 649 aa, Methanobrevibacter smithii
MNNLKGGENIVKKVFFISILIFFLAINIVAAEDSDNATADAYDKSQVENVVLQNIEIDNVRLNTSDVSVFSKGEFYNATLTYDDGTPVFNKTITFDVNGVKYNKVTNNQGIASLSIRLNQGTYVISTSFTDSYDRILTHYNYVYVSDVKGTVIPEGLSNIEIQKILDSANAGDNIIFAGKNYENISLTISKNPVNIYSSVKSTLNGNSKSPVFTIESSKAAGTVIYNLIIQNGSEGILLKGTNNITVLNNDITKNSRGISVIGTDKSNIIGNLISNSKSFGIYLKDSTNTLIYSNCITKGGNGIYFDNGVKYTTIEHNQISYNKGYGINLHGSGPYTNITDNNVSNNDYGINIDCKGDSELYITNNAIHNNDVGLNIGENYVRSDEEGLTGVGYNFIGLNNEFNIAAKENDNYPAFKMGPVLTDGNDEPFIKICNKIKTEFLSFDVKQIDKGSILVSVDSKITTAIPWKVSVNNGGNWGYMEINNGNGILHVNNGDGIVKFGYYGSSGQETYKLSDYEAYIKPNYPVPPSNPTNQNTNGNGTSSNTQQGQSSATTSGGSNDGSLSVAGANSVSASSAQCSASASDSGSSDGASSSASASSSQSVAKVIDIDEEVVRIAGISILILLIIAVIALYYRNDIKSMIEKKNGK

SEQ ID NO: 71 - DNA, 387 bp, Methanobrevibacter smithii
atgaataaagagaatatatcttatgtttgtattattatatgtgcattagttgctttagctattgtttcaatttatgcgctggaatattctcaggaaaaaactaatctgaaaattataagtgattctaatttacataatggtgattcattcactttaaggttaagtgatgcttataacagaccaattgacaacaaatctgttgaaattactgtaactgatgcattaggcgaaaaaaactctttcaatgttacaactgatagctgcggagaaaatacctttggaatgcgtgttactccaggagtctattcatttgattgtgttttttcgggtgacggtaattataagggatctagtacttcacaaaatatttcagtttgtgattactag

SEQ ID NO: 72 - protein, 128 aa, Methanobrevibacter smithii
MNKENISYVCIIICALVALAIVSIYALEYSQEKTNLKIISDSNLHNGDSFTLRLSDAYNRPIDNKSVEITVTDALGEKNSFNVTTDSCGENTFGMRVTPGVYSFDCVFSGDGNYKGSSTSQNISVCDY

SEQ ID NO: 73 - DNA, 3459 bp, Methanobrevibacter smithii
atgaattatttgaaagtattagcaatacttagtttattgtttatattttgtggttcagtttatggtgcaggtgaagctgattctccagatattaacggagttaatgcagttattgacgatacaattactgttgaaaacgctagcttaacctatgataaacttatcacaagcaataactgtgaggaagttgttattggagataattctatttgggatgttccgattagggaaggtcctattgtagaaaatgataacacgtctattccggatattactttaaaaggcgaaaatggcaataatatgtcttttaataatcctgcagatgtttttatcaatgaatcattcaacttccaaatggtatttaagaatttgggggacgctactggattccaaccttatattcagttaatagctcctaaagaactaacacattttactgtttcatattctaataggaagatagtcccgataaaagttggaatatttaatgaaagtacttatgacaatacaacgggtttatacaccttaagggatccatttactaaaaaagaagtgcatggtccggcaaacagtactttttatattcttcagtatcctttaggtagttttactgttaatgctcctgatgcggttttaaatattacttcaggtatcggagtattgaaaataggaaaattacttaattttactgttactcctgtttttagatatgggaacagtcctattgatgatccggtgaattatcctccaatttatggagaaactgttacaggatgggtaaatcctgttgttgttaaaatagataaaagttcaagtcttaatgaacatgaaactgctacaggttcaaatttcccatttagctattctgtaaatattaacatagctaatggtgcaaaaattgaaaatattactattacagatgtaattccgtctgatgtaatgtatttgggaagtccggttttatatgattctaaaggaagagttatagactctggtttatatactattgaagaacctgctggtaataaaacaggcggaaaactaattttaaaattaaaggaagctgttggagatttaagcaccacaagtatcactttaaagtataaggcttatgctccggaatttgataacagtactggtgacaacataaccattatcaattctgaaactggtgaatgtgttgctgctgcaagtactgtggatatgaattatacttatgttaatgatacttacaatgcttcaaatagttatagcatatatttaaaatcattagctactcaaaaatattcagaaattttaacaggatcaggtaagttacatcctgttgttcctcataatttaattgtgtataaaattgattttgagatttctgattactttgcttttgatgatttggtaatttatgataaatttgacacccataaagtaggttcagctcaaaaattcttaactgaatatgaacctgtcctatcaatttatggaaaaacatatgaattaaatgaaagttattacagtgttgtttctttaggagatattgatgaatcagttacattttatatttcaaaattcttaaaggataacaatataagtacaagcttaaaaggcggatattatacaaatagaagcgttaatcagggtgcaatggtagggtctttaaattttgttgcaaaagttattattcattattcaaacggatcttctgttgtatcaaatgatttggttattaattatattaaaacatcagctactgttttaaatacatttaatacggtttctgataacagttacacacaattaagagttccaagtgttacacttaagaaagatattattgcagttgatggtgaaatcataaatgatactgacttttataaagtttatcctggtcagaatataacttttgtattggatattcattttcctacaggttctgtaaacgattttattgtcactgactttttaccaattccattatttaacttaaaaggatttaatctggttaattccactactggagtaattcctaaatgcggatattgggcttatgcaaatgacagcggatttttatatgatgaaaatacaggtaaggttattgttcctaaaattggtatagatacttttaataatgcactttcatttaattttggaaatacattagataacctggctcatcctgttgatgttagattgtggtttacatttcaggtatcttcagaacctatggcagaccagcttaatttggctaatcttgctgaaatgaagtttaaggattccattgatgttgtatatgcaagctcaaatattgtactgatgcttactaatgaacctgaattaaaaattacaaaatatgtaaatgacacaaaaattttagaaaatattgaaaatgcaactgaagttgaatataatataactataactaacacaggtcattctgctgcttatgatataattgtagctgatgattttgttaacagaacaacttcaaatggaattacaaaagctgatgttaaatctgttagtttggtttactcaaacggaactgttgttgatattactgcatttaaagatgacttatttacaaaaggatatatgatagctcagttagctcaaaacacttcctgcagtattatatatactgtcaggtttagtgaatatttaatcccaaaggaaagtattgttaacaatgtatggattacaaactttgcagcatatcctaatagtacaaactttgcaaccaacaaagataagtatagggataatgcaactattatagctaaagggttaaacattacaaaagagttcattggatctaatgttactgacaatactgaaatactgtttgttggtgaagtggggatttataaaataactgtaaacttcccagacttaagagttccaaacttagttattaaagatgagtcatatggaattaagtatactaactttacaataactaccagtgatggtgttactgttcctgaatatgcatatacagtaacttatacttcaagtgctactcatcctgaaaaaagttatttgactattgactttaatggtgaccttgtacctgcttatgctaagaataaccaattaattgttaatgcatattatactgttgttaataatgaaaatgttattccaactggtgcagacagtgcaacaaccagtaatcatgcaagtattagttggactaataataccttaaattctgatactgtttatgttgatatatatcagcctaaaatagacataaataaggtatttggacctaatatagttcagggtaatgatgaggctagtttcacaattactgtaactaacagcggtaaaggtactgcttataatactactattacggatgatttaacagaatttatcaaaacctttgtaaatagtaggagtgatataggtgtaactatactaaaaggtaatgaaacaggtaaagttatttttaattga

SEQ ID NO: 74 - protein, 1152 aa, Methanobrevibacter smithii
MNYLKVLAILSLLFIFCGSVYGAGEADSPDINGVNAVIDDTITVENASLTYDKLITSNNCEEVVIGDNSIWDVPIREGPIVENDNTSIPDITLKGENGNNMSFNNPADVFINESFNFQMVFKNLGDATGFQPYIQLIAPKELTHFTVSYSNRKIVPIKVGIFNESTYDNTTGLYTLRDPFTKKEVHGPANSTFYILQYPLGSFTVNAPDAVLNITSGIGVLKIGKLLNFTVTPVFRYGNSPIDDPVNYPPIYGETVTGWVNPVVVKIDKSSSLNEHETATGSNFPFSYSVNINIANGAKIENITITDVIPSDVMYLGSPVLYDSKGRVIDSGLYTIEEPAGNKTGGKLILKLKEAVGDLSTTSITLKYKAYAPEFDNSTGDNITIINSETGECVAAASTVDMNYTYVNDTYNASNSYSIYLKSLATQKYSEILTGSGKLHPVVPHNLIVYKIDFEISDYFAFDDLVIYDKFDTHKVGSAQKFLTEYEPVLSIYGKTYELNESYYSVVSLGDIDESVTFYISKFLKDNNISTSLKGGYYTNRSVNQGAMVGSLNFVAKVIIHYSNGSSVVSNDLVINYIKTSATVLNTFNTVSDNSYTQLRVPSVTLKKDIIAVDGEIINDTDFYKVYPGQNITFVLDIHFPTGSVNDFIVTDFLPIPLFNLKGFNLVNSTTGVIPKCGYWAYANDSGFLYDENTGKVIVPKIGIDTFNNALSFNFGNTLDNLAHPVDVRLWFTFQVSSEPMADQLNLANLAEMKFKDSIDVVYASSNIVLMLTNEPELKITKYVNDTKILENIENATEVEYNITITNTGHSAAYDIIVADDFVNRTTSNGITKADVKSVSLVYSNGTVVDITAFKDDLFTKGYMIAQLAQNTSCSIIYTVRFSEYLIPKESIVNNVWITNFAAYPNSTNFATNKDKYRDNATIIAKGLNITKEFIGSNVTDNTEILFVGEVGIYKITVNFPDLRVPNLVIKDESYGIKYTNFTITTSDGVTVPEYAYTVTYTSSATHPEKSYLTIDFNGDLVPAYAKNNQLIVNAYYTVVNNENVIPTGADSATTSNHASISWTNNTLNSDTVYVDIYQPKIDINKVFGPNIVQGNDEASFTITVTNSGKGTAYNTTITDDLTEFIKTFVNSRSDIGVTILKGNETGKVIFN

SEQ ID NO: 75 - DNA, 8130 bp, Methanobrevibacter smithii
ttgaatgttggtgaacttttagccggtcaaagtgtcagtgctaaatttacattcaatgtaaaaaatgatgttgttattggaaaagaatttaagaatatagctaaagtagattattattctatttttaatgaaacaaaattcgatgaaaaaagaaattactctaaccaggcaagcagtaccctacacacttacgatgctaaagtaaataaaactgtatttaacacaactattgtaaatggtaaggataaggtaactgttggtgaaaatgtaacctacaatataactgtaatattgcctgttggaaaatacaatattttaaaagttacagacactcttccggaaggtttaaaatacattgacggttcaattgtagtttacaaaggaaatactcaaaataaagctgttgaaggtaaggattatactgtaactgtaaatggcaatattgtagaattaacatttgcttctgaatttgcagatgaaattattaaggaatatggcggtaaattccaggcatttttaaatgctacagtattaaatgttaacaataacaaagcaggtgctgttaaaactaataaagcagtacttacctggaatactcatgaatccacatctgatgcagctgtcggcattgttgaaccggccatagatattactaaaaacttcaatgtagacaatgttatcggtggggatgtaatatactttgatattactgtaactaacagaggtcagtctccattatttaatgtaacacttagtgacgatttaagtgatttaattagtaaatttgtcagtggaggcattaatattacatctggtggtgctgttgtaactccgacatgggataacaatattgtaagcataaatattgctgaacttggtataggcaaatcattaacttacagatttacatttaaaataagagaagatgtagttataagtagtagttatactaacacagctaatgcaataggttactctgcaccgtctaacggtagaaattacactgatgctgcaaaagacagttttaccaccaaacttccggtaattactaaatgggttgttgattcagagattgataatggtagggataaggtaactattggtgaaaaggtaatttatggtgttaatgtaactttgcctgttggtaattatactaaattggtgattaaggatactttgcctcagggatttgagtatattggtgcagatgcattttatgcaaatggtacaaaattagtaaatggcaaagattggactgtaaatgtaaataattatgatataactattacagtcaataatgttcattctagtaactttgcaaatggtgttttgtctattaatttgactgccagacctacaatatttgatccgtccaataaggaaggtgcggttaaagttaataatgtggaattgttcttaaatgatgaaactatgggtaagtctagtgcaaaggttacaattgtagaacctacggcagacattactaaaaaattcaatgtaactgaagttgaaggcttagatcatgtttcatttgatgtaattgttaaaaacaacggtaaaaccccattatttgaagtgactattattgatgatttggaagaccttgcttcatttattggtcaaacacctggtgaagataatgtggttattaaagtaactggtgctgatggaaatccaattgatgctaaaatcaaatggattggttctcatgttgaaattgatgtggctcagttaaatcctggagatataattcatgcaaaatattcatttgttataaggtcagatatccaaattggaagccaatatgtaaatatggctaatgttgtcggatattccgcacctgatcatggtagaaattactataattatgatgaggacactttaaaaactaaacttcctgcaattactaagtgggttgttgattcagagattgataatggtagggataaggtaactattggtgaaaaggtaatttatggtgttaatgtaactttgcctgttggtaattatactaaattggtgattaaggatactttgcctcagggatttgagtatattggtgcaggtgcattttatgcaaatggtacaaaattagtaaatggcaaagattggactgtaaatgtaaataattatgatataactattacaattaataatgttcattctagtagctttgcaaacggtattttgtctattaatttgactgccagacctacaatatttgatccgtccaataaggaaggtgcggttaaagttaataatgtggaattgttcttaaatgataagactatgggcaggtctagtgcaaaggttacaattgtagaacctacggcagacattactaaaaaattcaatgtaactgaagttgaaggcttagatcatgtttcatttgatgtaattgttaaaaacaacggtaaaaccccattatttgaagtgactattattgatgatttggaagaccttgcttcatttattggtcaaacacctggtgaagataatgtggttgtcaaagtaactggtgctgatggaaatccaattgatgctaaaatcaaatggattggttctcatgttgaaattgatgtggctcagttaaatcctggagatataattcatgcaaaatattcatttgttataaggtcagatatccaaattggaagccaatatgtaaatatggctaatgttgtcggatattccgcacctgattacggtagaaattactataatgaaagtaaggatactttaaaaactaaaatgccaagtattactaaattagtaattggaactacacttggcaataaagaaggcaacatttttacaccaaatattggtgaaaatgtaacttatcaaattatggtaaagttacctaaaggtaattacactaatttgcaggttaaagatatccttccacaaggatttgaatatcttgaaaattcagttattttatcaaatggtactttaatcagtgatgtcagtgtaaatggaaaccttgtaactataaactttggaaatactacatcttacaaatattctgacaacattatatttaatttatctgctgttgtcttaaatgatcaatctaacaaagcacaatctattaaatctaataatgttgaattatatttaaatgatgataaaatagataattctaatgcacaagttaaaatagctgaacctaatataagtgttgttaaaacatcagataaacaaaaatatgaatattatgaaaatgcaacttattcaattgtaattacaaataatggaaacggaatagcatataatatcacaattaaagatgtgctgccattaggtttaaaatacactggtattaattcaacttccaagtcaaatggatgggttgttgaatttgatgaaaatacacgaacatttacagttaatggtcttaatttaactgttggtgacaaattcacattcacatataaagtttcatttgatgaatgggaaatagatggtgtaaaatactcaccaattggccaaaactttataaactcagttaatgtagcttatgtttcaattaatggaacaaatccaaataataggacatacactactcaaacaaccaaagaagttcatgttactgaagctgatcttaatgtagttaaaaactgtaataatgaagtagttatagctggtgaagatatttactacacaattataattacaaataacggactagatactgctcaaaatgttaaattaaatgaatattatcattcagaatatttaactaatttagaatactctttagacggtaaaacatggaatgtttacaataagcctattgatttaggaaatatcaattctaaagcttctaaaactgtctatatcagaggacatttggatgcaggtattgttgatgatacaatattaaacaatactgtcagagtcaacaccactacaggagaattaaaacttgaggataatgaagctacaaacattaaaaatgttactacattagctgaattgcatgttactaaagttaatattactgaagcaattgcaggtaaaattattaaatacgaaatagtaattaccaataatggaccttcatatgcacgtgatattattttaaaagatatttataatgattctgaattaacaaatatgttgtattctttagatggtcaatcatggactcgttatgatgcttctattaatattggaacattagctaatggtcaaaataaaacaatattatttgaaggattcattaaaacaactgttcgtggaaatgtaataaataaagcggttattggctcttcaacaaaattaagagaaaatagtactttagaagatgatgttgctgtaaatgttaaaggagatactacattggacattacaaaagtagctaataccactcttgtaaatcctggagatgtaattaagtatactgttcaaataactgcaggaggattgtcagattctttagatgttattttaactgataatttaagtgaaatgttctttgatgttagtaaggcaacttattctgtaaacggaatagacaaaggtgtttggataggaaatgcaaaccttggaaccatttcttcaggaatgactgttaatgtagtaattacagttccagttaaagcatatgttgatgttggaaaattaaacagcattacaaactttgcatctgtaattaattcagataaaaaagcagctaatgatacaaacattgttccaattaatgtaattgatttggcagttaacaaaacagctaatcatcaaaataaaacatataattatggagataatgttgagtatgttattgaaattgttaacaatggtcctggaatagctactgatattatagctactgacaacttaccagaaggattgaaatttattaatgctaatgttccgggtggttggactcttagtatatccaataataaaatcacaataaatggtgaaaaattagctaatggtgaaaaagttttaattactattatagcaaaagctgcaaaatcaaatacaacccttataaataatattaaagttaatggtactggatttgattcaaacatctcaaataataatgattctgaaacaattaaaataactcctttagttgatttggctattacaaaagtagttgataatgcaaatccattatttgactcaataataacttacacaatcactgttgttaataatggtcctgataagtcatttaatgttactgttggtgatttattgcctgatggtgttaaattcatcagctctgatggccgatacgatccagttactggtgtttggtttgttggtgatttagatgctaatgaaagtgtaactttaaagattgttgttcaggttattaaggttggaaatattactaataatgttaatgttactggtactggtcatgatactaatttaactaataataatgattctgttagtgttagtgttcctgattgtgttattttggatatttctaaagtagctaattctactgttattgtagctggtgaaaatgtaggttatactgttgttataaacaattacggtccttctgtagctaatgatgttgttctaaaagatgtttataatgttaaagagttatttggattacaatattcattaaacggtaaagattggttcaattacaatgaagctattaatttaggtaatattgatgttggtgctagtgtaactgtttactttagggctaaagttaatgcttctgttcgtggtgatgttttaaacattgttaatattattaccagtgttgatgatgctagaggtaactttacagataatgaaacagttaatgtaattgctaacactactttggttgtaattaaggatgctgaaattaaggagttaaatcctggtgatacagttcatttcattgttactgttattgctggtggatcttcagattcattgaatgtaaacttaaatgatattttggataataagttgttagatattaattcagctaaatactctattaacggtggtattttaagtgactttaatggaaatatttatttaggcaatatgcttacaggtactactgtgactgttgatatttgggctaaagtattggatattgctgatagggacattttcaatttagttaatgttactagtgatgagcatcctgagggtaatacttctaatgtcagtgttcatgttaggattgttgatttggctgttgataagctggtaaataattctgttcctaagtatttggatatgattgagtatactattgttgttgttaataatggtcctgataagtcatttaatgttactgttggtgatttattgcctgatggtgttaaattcattagttctaatggtcagtacaacccagttactggtgtttggtttgttggtgatttagatgctaatgaaagtgtaactttaaagattgttgttcaggttattaaggttggaaatattactaataatgttaatgttactggtactggtcatgatactaatttaactaataataatgattctgttagtgttagtgttcctgaatcagtattgttaaacattacaaaagttgcaaattcaacaataattgttgctggtgaaaatgtaggttatacagttgttataaacaattacggcccttctgttgctagtgatgttgttctaaaagatatattcagcagtaatgaattgcttaacttacaatattcattaaatggtgtagattggttagattacaatgaggctattaatttaggtaatattgatgttggtgctagtgtaacggtttactttagagctaaggttaatggttctgttcgtggtgatgttttaaacattgttaatattactactggtgttgatgatgctagaggtaactttacagataatgaaacagttaatgtaattgctaacactactttggttgtaattaaggatgctgaaatcaaagcacttaaccctggagacacagcacactttgtcattactgttattgctggcgggtcttcagattcattaaatgttaaattggaagatattttagatgctggattgttggatgttaaatctgcaacctacagaataaatggaggtaatttaactgattacactcaaattatttcattaggaaatatgcatactggcagtaagatagttgtagatatttatgctgcaatattaggtacaaccggtcaggatatcttcaattgtgtaaatgtcactagtgatgagcatcctgaaggaaacacttcaaatactacaatacatgtaaatattgctgatttagaaattattaaaatagtaaataatgctactccaaattacggagacgaaataacttacacaataactgtaagaaacaacggtccggataactcaaccaatattaaagtatctgaagtattggcagataatttcaaattcatttcagctaatgcttctaaaggatattatgatttaacaaatggtgtttgggcagtcggtaatttaactaataatgaaacagctaaattagttattactgtaaaaatagttaaaacaggatttattcaaaacaatgtaagtgtaaatggaacaggttttgatcctaacgtaactaacaacaatgctactgtgaatattactgttcctcaaacagcagatttgtctgttgtaaaaatagttaatgttgatagggtaagtgttggaaatagaatcacatacactattgttgttaaaaataatggtcctgacacagcattagatgtttatgcagtagataaattatcagatgctcttaaatttgtttcatataaagcaagtgtaggagtatatgatccggcaactggtatttggacaatcggtaatttaactaacaaaagcaatgctacattggaaattacatgtattgttttaaaaaccggcgtaatatctaatgaagtatttgtaaatggaagtacagttgacttgaatatgactaacaattatggtaatgtttcagttactgtaattccggctcctgctccagtacatcctgctgataaagatattatggattctgatgaagttgcaatgggtgttgatgcaatggcaaaaacaggaaatccaatacttgctttattggttgttttaatcttcggaatatttggatttggagtttccagaaggaaaaaataa

SEQ ID NO: 76 - protein, 2709 aa, Methanobrevibacter smithii
MNVGELLAGQSVSAKFTFNVKNDVVIGKEFKNIAKVDYYSIFNETKFDEKRNYSNQASSTLHTYDAKVNKTVFNTTIVNGKDKVTVGENVTYNITVILPVGKYNILKVTDTLPEGLKYIDGSIVVYKGNTQNKAVEGKDYTVTVNGNIVELTFASEFADEIIKEYGGKFQAFLNATVLNVNNNKAGAVKTNKAVLTWNTHESTSDAAVGIVEPAIDITKNFNVDNVIGGDVIYFDITVTNRGQSPLFNVTLSDDLSDLISKFVSGGINITSGGAVVTPTWDNNIVSINIAELGIGKSLTYRFTFKIREDVVISSSYTNTANAIGYSAPSNGRNYTDAAKDSFTTKLPVITKWVVDSEIDNGRDKVTIGEKVIYGVNVTLPVGNYTKLVIKDTLPQGFEYIGADAFYANGTKLVNGKDWTVNVNNYDITITVNNVHSSNFANGVLSINLTARPTIFDPSNKEGAVKVNNVELFLNDETMGKSSAKVTIVEPTADITKKFNVTEVEGLDHVSFDVIVKNNGKTPLFEVTIIDDLEDLASFIGQTPGEDNVVIKVTGADGNPIDAKIKWIGSHVEIDVAQLNPGDIIHAKYSFVIRSDIQIGSQYVNMANVVGYSAPDHGRNYYNYDEDTLKTKLPAITKWVVDSEIDNGRDKVTIGEKVIYGVNVTLPVGNYTKLVIKDTLPQGFEYIGAGAFYANGTKLVNGKDWTVNVNNYDITITINNVHSSSFANGILSINLTARPTIFDPSNKEGAVKVNNVELFLNDKTMGRSSAKVTIVEPTADITKKFNVTEVEGLDHVSFDVIVKNNGKTPLFEVTIIDDLEDLASFIGQTPGEDNVVVKVTGADGNPIDAKIKWIGSHVEIDVAQLNPGDIIHAKYSFVIRSDIQIGSQYVNMANVVGYSAPDYGRNYYNESKDTLKTKMPSITKLVIGTTLGNKEGNIFTPNIGENVTYQIMVKLPKGNYTNLQVKDILPQGFEYLENSVILSNGTLISDVSVNGNLVTINFGNTTSYKYSDNIIFNLSAVVLNDQSNKAQSIKSNNVELYLNDDKIDNSNAQVKIAEPNISVVKTSDKQKYEYYENATYSIVITNNGNGIAYNITIKDVLPLGLKYTGINSTSKSNGWVVEFDENTRTFTVNGLNLTVGDKFTFTYKVSFDEWEIDGVKYSPIGQNFINSVNVAYVSINGTNPNNRTYTTQTTKEVHVTEADLNVVKNCNNEVVIAGEDIYYTIIITNNGLDTAQNVKLNEYYHSEYLTNLEYSLDGKTWNVYNKPIDLGNINSKASKTVYIRGHLDAGIVDDTILNNTVRVNTTTGELKLEDNEATNIKNVTTLAELHVTKVNITEAIAGKIIKYEIVITNNGPSYARDIILKDIYNDSELTNMLYSLDGQSWTRYDASINIGTLANGQNKTILFEGFIKTTVRGNVINKAVIGSSTKLRENSTLEDDVAVNVKGDTTLDITKVANTTLVNPGDVIKYTVQITAGGLSDSLDVILTDNLSEMFFDVSKATYSVNGIDKGVWIGNANLGTISSGMTVNVVITVPVKAYVDVGKLNSITNFASVINSDKKAANDTNIVPINVIDLAVNKTANHQNKTYNYGDNVEYVIEIVNNGPGIATDIIATDNLPEGLKFINANVPGGWTLSISNNKITINGEKLANGEKVLITIIAKAAKSNTTLINNIKVNGTGFDSNISNNNDSETIKITPLVDLAITKVVDNANPLFDSIITYTITVVNNGPDKSFNVTVGDLLPDGVKFISSDGRYDPVTGVWFVGDLDANESVTLKIVVQVIKVGNITNNVNVTGTGHDTNLTNNNDSVSVSVPDCVILDISKVANSTVIVAGENVGYTVVINNYGPSVANDVVLKDVYNVKELFGLQYSLNGKDWFNYNEAINLGNIDVGASVTVYFRAKVNASVRGDVLNIVNIITSVDDARGNFTDNETVNVIANTTLVVIKDAEIKELNPGDTVHFIVTVIAGGSSDSLNVNLNDILDNKLLDINSAKYSINGGILSDFNGNIYLGNMLTGTTVTVDIWAKVLDIADRDIFNLVNVTSDEHPEGNTSNVSVHVRIVDLAVDKLVNNSVPKYLDMIEYTIVVVNNGPDKSFNVTVGDLLPDGVKFISSNGQYNPVTGVWFVGDLDANESVTLKIVVQVIKVGNITNNVNVTGTGHDTNLTNNNDSVSVSVPESVLLNITKVANSTIIVAGENVGYTVVINNYGPSVASDVVLKDIFSSNELLNLQYSLNGVDWLDYNEAINLGNIDVGASVTVYFRAKVNGSVRGDVLNIVNITTGVDDARGNFTDNETVNVIANTTLVVIKDAEIKALNPGDTAHFVITVIAGGSSDSLNVKLEDILDAGLLDVKSATYRINGGNLTDYTQIISLGNMHTGSKIVVDIYAAILGTTGQDIFNCVNVTSDEHPEGNTSNTTIHVNIADLEIIKIVNNATPNYGDEITYTITVRNNGPDNSTNIKVSEVLADNFKFISANASKGYYDLTNGVWAVGNLTNNETAKLVITVKIVKTGFIQNNVSVNGTGFDPNVTNNNATVNITVPQTADLSVVKIVNVDRVSVGNRITYTIVVKNNGPDTALDVYAVDKLSDALKFVSYKASVGVYDPATGIWTIGNLTNKSNATLEITCIVLKTGVISNEVFVNGSTVDLNMTNNYGNVSVTVIPAPAPVHPADKDIMDSDEVAMGVDAMAKTGNPILALLVVLIFGIFGFGVSRRKK

SEQ ID NO: 77 - DNA, 1839 bp, Methanobrevibacter smithii
atgttgtctgtatctgcagttggtgcggcttcagatgttggtaatgtggtgtcatttgatgacgatgttgaaacaagtgatttggatgttgatcctccatcggggattgatgatataaataatgtaacttattctaaatccgaatatactcgagaaccggttatttatggtgaagacctttcaatgtattataaaaacggaagccggtatgaagtatctatatatcaggatggtaaacttataaattctcaaaataatgattctaaagtaattttcaatgttaatggtgtgaattacacaaaagaattggtaaacggtaaagctttcatagggattaacttaaatcctggaaattacacaataactacattttatcattatacagacggattagctaccaagaccaataatattgaagtattgtctactattcaggctaatgatgttgttaagttttttaggaatggtactcagtattgtgctaagtttttggatggttgtggcagtcctttggttaatgccagtgttatttttaatattaatggtgttttttataaaaagcagactgatgataatggtatggccaaattgaatattaatttgcgccctggtgtgtatattttaactgctatgcatcctgacgctttgatgtatggaagtaatatcactgtactgtctactattctggctaatgatgttgttaagttttttaggaatggtactcagtattgtgctaagtttttggatggttgtggcagtcctttggttaatgccagtgttacttttaatattaacggtgtgctttacaaaaaacagactgattatgaaggtgtagctaggctgaatatcaacctctttccgggaaagtatattttaactgctatgcatcctgacggtttgatgtatggatataatattactgtactgtctactattcatggagacgacattgttaagttttttaggaatggtactcagtattgtgctaagtttttggatggttgtggcagtcctttggttaatgccagtgttatttttaatattaatggtgttttttataaaaagcagactgatgataatggtatggccagattgaatattgacctatttcctggagagtatattttaactgcaattcatttaaacggtgaagaaaaagcaaatattattaaagtattgactactatttcagcagaggatatttcattaattgagaataaaagtggagtatttgtacttaaaactcatgacggtgcaagaaatgtatcaataacaattgatggtgttgaatacattgttcaaactgatgatggaggtgttgctactttgaatgtttctttatcaaagggtaatcatgcagtactttccaagaacttgaattcaggagaggaaatattcaatacgatttatgtaatggaagatcctgcttttattaaatactacagcatttacggtgtatctcctgatggaaaatatattatggctatcggaagaccttcagctgctggtgaattaagcaaatatggttatacattatacaaatcagtatttgaaagaatatgtccatgctgcagaagtgacagactttactggggaatattttgggcaggcagtgaaacagcaaactggggtgttttcccagctactggtttaaaagagtcaggaagtgcagaaggtcatatattctgtgctaaatgtgatgcagatttctctgttattgatggtaaaaaccatggtggcggttctaaaaatctgataaaagttatttctactgtcagttcatcgaaggatgaagcatacatattaaaaaatggacaaatgccttattcggcattataa

SEQ ID NO: 78 - protein, 612 aa, Methanobrevibacter smithii
MLSVSAVGAASDVGNVVSFDDDVETSDLDVDPPSGIDDINNVTYSKSEYTREPVIYGEDLSMYYKNGSRYEVSIYQDGKLINSQNNDSKVIFNVNGVNYTKELVNGKAFIGINLNPGNYTITTFYHYTDGLATKTNNIEVLSTIQANDVVKFFRNGTQYCAKFLDGCGSPLVNASVIFNINGVFYKKQTDDNGMAKLNINLRPGVYILTAMHPDALMYGSNITVLSTILANDVVKFFRNGTQYCAKFLDGCGSPLVNASVTFNINGVLYKKQTDYEGVARLNINLFPGKYILTAMHPDGLMYGYNITVLSTIHGDDIVKFFRNGTQYCAKFLDGCGSPLVNASVIFNINGVFYKKQTDDNGMARLNIDLFPGEYILTAIHLNGEEKANIIKVLTTISAEDISLIENKSGVFVLKTHDGARNVSITIDGVEYIVQTDDGGVATLNVSLSKGNHAVLSKNLNSGEEIFNTIYVMEDPAFIKYYSIYGVSPDGKYIMAIGRPSAAGELSKYGYTLYKSVFERICPCCRSDRLYWGIFWAGSETANWGVFPATGLKESGSAEGHIFCAKCDADFSVIDGKNHGGGSKNLIKVISTVSSSKDEAYILKNGQMPYSAL

SEQ ID NO: 79 - DNA, 6582 bp, Methanobrevibacter smithii
atgaaatttaataaacaattctttttaggcattatgttgcttgttctccttttgggagtaagcagtgtaagtgcgaacgatttgaatgaggataattcatcttatattagattagatgactcttcaatggtaattatggaggattctgctcaggcaggcagcgatgttaatgctcagacaggcaatccttctgatgatgtgattattgtaaataattggggtgaactaaaaacatactgtgaaaaaacagataaaaactatgtgcttcagttaaaagaaaatactaatttttacccggaaaatggagatgacatttccaatcagattactgttagaaataatgtaactatcctgggaaatacaggagcatatattggtgatgtatctcctaaggcatcaacacttttttatactccaatttcaactccggaaaattcaggaattagtttaaaattagttaatttgacatttaaatttatatctgtttcaaaactttcatctctggatagtggaatggttgtggagttggctggtgattgtactggcaacttgcttgaaaattgtacttttgacaatataactgctttgtcaggtcattcctgtgtttattatattaaaaaaggttatacaactgttagaaattgtaattttacaaacatcaatacatgttttggtgttttaagtatttatgatcctgatgctggcttaaactgtaatacttcacatatgttagttgaaaactcttattttgaaaataattatgctacaacagaacctggatgtattaacaattgcggtcagttaattgttaaaaattctacattttataaaaacagtgcattttggtgggctggagcaatacacactcacagtggagcaaatacaacaatatatgattctaatttcacagataatgtagctggatggaatggtggagcattgtatacctacagttacctgcaaatatacaacaccacttttacaagtaataactgtacaaccaacaatggtgggggagctattggtgcatgtttctatggaaccaatcctcatatttatattgaaaactcattattccagtataatacaaacaactgctggtctcttactaatgaatctacaacaggtactggtcgtggaggagctatttcaataatggatgcaggtgatttggatgtatataatactactttcatagctaattctgcatctataggtactgcaatttgtgcaaatcaggcacagggttacggatctccaaatgtcagattaataggcaataaatttattaatcacacagtggttggcgatgtattgataattgatctttccaaatctgaactggaattatctgataattattattataacaattctttagtattttctaaaaccaaacttagtgaagaggaaagaattggcaacacaacagtattgaatattcagtttaaattaaaaaacgacaaatattatgattctgatattttatccaaatcaggttattttgtttatgtagatggtgtttatttaaaaacagtctacagtgagtcttttaatttgacttttaatgacggtaaggaacataaggtatatgtacgttcagttgcaggtgtcagtaactcaaataatctcactgtaaatggtgtacctgttcagtatatctatgtttctgtaaacggtaatgacaacaataacggaagtaaaaacgcacctgtacgtacaatagctaaagctatttctttaaatactaatggaatttatattttagagggaaattacagggaatatggattaaatattaacagtgatttaaaaattgttggtgatggaaaagttattattggcggaattagttcagctgatccggtatttaaaatttcaaacagtgcaaatgtatcatttaataatttaaaatttgctgatatatccaacggtgaaattattaatggattagctgctggagaagttgaaataagtggttgtgagttttattcaaacaatcagaaaggaattcttgttaatgtagctaatttgcttatttcagattctaaatttgaaaataataatgttttcaaatgcatttatactaattatttggaaatgagaaactgtgaatttgtaaacaatactgcaaacgagaaaaaatccacttctgaggtaggcaatttaatttatctggaccttaaagaccagcaaggaataatttcaggcactttctttgaaaataataatgtttatcagggatgtatttttgtaaaaagtagtgattttaatcaaggattggagattgcgagttctgttttcataaataatactggagtatttagaggaggctgtctgtatgctgattcaagttccagcagcaactatcctattacaatttcatcttctgtatttattgataattttgcacagtctggaagtgttgcttttgttatgaaaaaatgtgtacttacagctacaaattcaatctttttaggcaataaagaaaaatcctcatcattaggagaggtattttcaactgtaggcagcagtgcaaaatttgcaatagacagtaattggtggggtaacactgctgaaaatgcaacaactgctccaagaaaagggttgaacaattggttatttttaaatgtaactggtaatgttgataaattgaatttcaatgaaaatgggataataactgttgatttagctaatgtaattaataacaacggtgaaatcagcaaatatgatgctggagacaaattgccattagatactttaaatatcacttctgttaatggtataacaacaactgtcggtgataaatttgtggatggtaaaatacaggttatatttactccaactgctactggagaagcttcagtaactactgatctttatggagtaaccagtactataaaattcaatgtaggtaaaacactttcagatttacatatctatactaatgatattaaggtaaatgaagaccttgtaattaaagtagctttagaaagcagcaggccaacaggtaccgttacagttaatattaataataaatcatatattattaatttagtaaacggtactggatttacaacaatatctggattagctggcggagaatatgaaattactgccaaatataatggtgatgataattacgaagaagctattgctacgtcttcagttaaagttaataaaatagcttcatcaatggatattaaagtttctcttggaaaatacactacaattgttgtaagtcttccagaagatgcaactggtgaagtaatgtttactgttgacggtgaaagtgaaactgcaactattgaagatggtaaggcatatatagttttatttgaccttgatgagggagttcacactgttcatgcagtttatggtggagataataactactttggatgtgaagctagtgaacaattcagtaaaaccaaacttaattctactttaactgtaaatgcaaatgatgctaaagtaggtgaagacgttgttgtttctgtaattgtcatgcctgctccaggtagtgacggatccagtgtaaatattacaatcggagataaatccacaattgtaaaagttgataaagatacaggtaaggcttccttaaaagtatctgatttagcagcaggtaattacactgttaaagtagtttataatggtaacggattgtataatggttgtgaaaatacaactaatattaaaataaccggttattctgttcctcaatggggtaatgatggatttgacactaaaaacactggaaaaacaaattacacaggaaatagtaatggtgtagctatctggaattatgttgtaagcggaagtcagattaacggttctatggctattgataatgcaggaaatatttatgtagcttgtaatgatggaatttattcatttacttcaaacggaactttaagatggaaatttgaaggttcctttggaagagagatatcttcaggaatagctatttcccgtgatgttattattgctccaaaagcaggagatgcaatatactttataaactccactacaggcaaaaaatataattccaatatctggcagggatcaagtattttctcacctgttgtagatgaaaatgctaatgtatatatttccagtgaataccagtacagcagcggaagctacaatctggtaatcatcccatataatatgtggaaatacggcggaactcctacaatgattgatttaggatcccaaccggttagtgcacctacattactgggtaacggattggtagctgttaatacaaaagacggtcttaaaataatcaatgttacaagcaaaactgtaattggaagttttgtaggaataggtgttgtaggacgtccggtagttgactccagtgatgtcatatatgtatttgataaagacggaaaagtcaatgcattaagtgcaaataacaaattatggactactgaaatagctataaatggaagcacattagctttagatgaagaaaacagtgcattatacactgttggcagtgatggaaatgtctataaaatagatatatttaacaaaggagcagcttctgttttctataatttgggaggtaatgcatcttccataatgattgacaatgatggaactgtttatataggttcagataatggaaaagtttctgccatcactagtgaagctaaattattatggacatttactgctgagtctccaattaaaggaccaatcgtcatggataaaaatggtacggtctatgtttattccagtaaaacagtttatgcagtaggaatgggaaaaatcactcctgctattgatgtaaatgctgaggatgttaaagtcggtgaagatgtaattatcaatattgagcttcctgatgatgctacaggcagtgttgaagtagttattggaaatattacacaaaatgttaatattaaagacggtaaagcttctgtaactattgctaatttaagtgccggtcaatacagtgctgctattcagtacagtggggataataaatacaacggtgcaaaaacagatgttttatttaatgttaataaacatgaatcaaaagttgatatttctgcagatgatatagaaattggtaaaactgctgttgtaaccattaatgttactcctggtgctacaggtaatgttactgtagttgtcaatggcaaatcacaggttgtagaacttaaagacagtaaagctactttaactattgaaaacttagctgctggagattataaagtagaagcaatctataatggtgatgccaagtatttagcttcaagcaataatgcttcattcaaagtttccaaaatatcaggatatgatattaaagttaatgctggtgaagtaaatgaaggtgaagatgctacaattatagtagttttacctaaagatgctaccggcaatgtaactttagttatgaacaacaaaccttactttgcaaaagtcagtgatggtatggctaaagtggttgttccgtctgtttctgcaggaactcatgatttcattgtaaattattctggtgatgataaatatgataaatcaactgtaaacggaactataaaggttaataaaaaagcagcaacattaattgttgaagatcttgtaaaatattacaaaggagatgaaaaacttacagctaaactggtagacggcagaggcaatccaatagctaatgctgatgttgcttttaatattaatggtaaagattacatcagaaaaaccaataatgaaggaatagcttctatgaatattaatttggtggctggaacctataatgtggcagttaaatataatgaaagctcagttaatgtaacagtaactgtaaaatctactattgtagctgatgatttagttaaaatgtatcaggaccctacaagattctatgctaagttcctggacagtacaggaaaagcattggctaatactcaagttagatttaacattaatggtgttttctacactaaaactactaataatgatggagttgctgatttgggtattatgttaagacctggaacatatattttgactgcatataatcctgcaaatggtgaagaaagaggaatcaccataactgtaaaatctttaatagttcaaagtgatttaactaaatactacttaaatgcttccagattccaggcaaccatttataataaggatggaagcttggcggtaaacaaagaagtaacctttaacatcaacggtgttttctatcataaaaccacggattcaaatggtgtagctagtttaggtattgctttaaggcctggagaatatattatcacaactattgttgatggacttgatattggaaacaaggtcactgtacttcctacattagtaactaaagatttggatatgaaataccttgatggaagtgactttactgcacaaaccttggacggtcagggtaagccattagctaaccaaaatgtatcatttaatgtgaatggtgtattttatcataaagtcactaatgaggacggtattgcaagtctaaaaatcagattgatgagtggtgaatacattataacttcctcatggaataatttccaaacaggaaacactataaaaattagtccttaa

SEQ ID NO: 80 - protein, 2193 aa, Methanobrevibacter smithii
MKFNKQFFLGIMLLVLLLGVSSVSANDLNEDNSSYIRLDDSSMVIMEDSAQAGSDVNAQTGNPSDDVIIVNNWGELKTYCEKTDKNYVLQLKENTNFYPENGDDISNQITVRNNVTILGNTGAYIGDVSPKASTLFYTPISTPENSGISLKLVNLTFKFISVSKLSSLDSGMVVELAGDCTGNLLENCTFDNITALSGHSCVYYIKKGYTTVRNCNFTNINTCFGVLSIYDPDAGLNCNTSHMLVENSYFENNYATTEPGCINNCGQLIVKNSTFYKNSAFWWAGAIHTHSGANTTIYDSNFTDNVAGWNGGALYTYSYLQIYNTTFTSNNCTTNNGGGAIGACFYGTNPHIYIENSLFQYNTNNCWSLTNESTTGTGRGGAISIMDAGDLDVYNTTFIANSASIGTAICANQAQGYGSPNVRLIGNKFINHTVVGDVLIIDLSKSELELSDNYYYNNSLVFSKTKLSEEERIGNTTVLNIQFKLKNDKYYDSDILSKSGYFVYVDGVYLKTVYSESFNLTFNDGKEHKVYVRSVAGVSNSNNLTVNGVPVQYIYVSVNGNDNNNGSKNAPVRTIAKAISLNTNGIYILEGNYREYGLNINSDLKIVGDGKVIIGGISSADPVFKISNSANVSFNNLKFADISNGEIINGLAAGEVEISGCEFYSNNQKGILVNVANLLISDSKFENNNVFKCIYTNYLEMRNCEFVNNTANEKKSTSEVGNLIYLDLKDQQGIISGTFFENNNVYQGCIFVKSSDFNQGLEIASSVFINNTGVFRGGCLYADSSSSSNYPITISSSVFIDNFAQSGSVAFVMKKCVLTATNSIFLGNKEKSSSLGEVFSTVGSSAKFAIDSNWWGNTAENATTAPRKGLNNWLFLNVTGNVDKLNFNENGIITVDLANVINNNGEISKYDAGDKLPLDTLNITSVNGITTTVGDKFVDGKIQVIFTPTATGEASVTTDLYGVTSTIKFNVGKTLSDLHIYTNDIKVNEDLVIKVALESSRPTGTVTVNINNKSYIINLVNGTGFTTISGLAGGEYEITAKYNGDDNYEEAIATSSVKVNKIASSMDIKVSLGKYTTIVVSLPEDATGEVMFTVDGESETATIEDGKAYIVLFDLDEGVHTVHAVYGGDNNYFGCEASEQFSKTKLNSTLTVNANDAKVGEDVVVSVIVMPAPGSDGSSVNITIGDKSTIVKVDKDTGKASLKVSDLAAGNYTVKVVYNGNGLYNGCENTTNIKITGYSVPQWGNDGFDTKNTGKTNYTGNSNGVAIWNYVVSGSQINGSMAIDNAGNIYVACNDGIYSFTSNGTLRWKFEGSFGREISSGIAISRDVIIAPKAGDAIYFINSTTGKKYNSNIWQGSSIFSPVVDENANVYISSEYQYSSGSYNLVIIPYNMWKYGGTPTMIDLGSQPVSAPTLLGNGLVAVNTKDGLKIINVTSKTVIGSFVGIGVVGRPVVDSSDVIYVFDKDGKVNALSANNKLWTTEIAINGSTLALDEENSALYTVGSDGNVYKIDIFNKGAASVFYNLGGNASSIMIDNDGTVYIGSDNGKVSAITSEAKLLWTFTAESPIKGPIVMDKNGTVYVYSSKTVYAVGMGKITPAIDVNAEDVKVGEDVIINIELPDDATGSVEVVIGNITQNVNIKDGKASVTIANLSAGQYSAAIQYSGDNKYNGAKTDVLFNVNKHESKVDISADDIEIGKTAVVTINVTPGATGNVTVVVNGKSQVVELKDSKATLTIENLAAGDYKVEAIYNGDAKYLASSNNASFKVSKISGYDIKVNAGEVNEGEDATIIVVLPKDATGNVTLVMNNKPYFAKVSDGMAKVVVPSVSAGTHDFIVNYSGDDKYDKSTVNGTIKVNKKAATLIVEDLVKYYKGDEKLTAKLVDGRGNPIANADVAFNINGKDYIRKTNNEGIASMNINLVAGTYNVAVKYNESSVNVTVTVKSTIVADDLVKMYQDPTRFYAKFLDSTGKALANTQVRFNINGVFYTKTTNNDGVADLGIMLRPGTYILTAYNPANGEERGITITVKSLIVQSDLTKYYLNASRFQATIYNKDGSLAVNKEVTFNINGVFYHKTTDSNGVASLGIALRPGEYIITTIVDGLDIGNKVTVLPTLVTKDLDMKYLDGSDFTAQTLDGQGKPLANQNVSFNVNGVFYHKVTNEDGIASLKIRLMSGEYIITSSWNNFQTGNTIKISP

SEQ ID NO: 81 - DNA, 3789 bp, Methanobrevibacter smithii
atgaggtgttttatgaggaaaaaattcttaacagtattttttattttattgtttttactatgtttgtctgtagtttctgcaactgatgaaaatactaattccagcatagttgctcaggattatgatggaaatgaattttatgttgatttaggaggagatgatagtaactccggtcaacttaatagcccatttaattcaataaataaagcagtagaagtatctaatcctcgtgataatgttgttattcatttaggggaaggtacatttgaaggaaatggaaatgtgatgatatcaatcaataaagctcatttaagccaaggtggttcaataactattgttggtgcaggagctgataaaactataattaaaggaagtagtgcatattatgcatttaatatatatgctgattctgtagttactttaagagatttatctattgttgattgtaaaagtgttgaaggtggtgcaatatgcaattccggtacattattagttgataactgtattttcaggaataattttgcattcaatactgggggagctatatcttctatagaaaatggggattgtaaaatttataactcagtatttattaataattcagttacctgtaatgatgaatatgggaatgctaatggtggagctgtttattcattaaaaagtgatttattagttgattcctgcagatttgtaggtaattttgcaaaaggtaactgtttaaatgcaatttctggaggagctatttatgtaggtacttatttaaataatgttccttctgtgaaaaacagtaattttattaataattatgttgtttcaacaaacttcagaacaaactgggaatatgccaaaggcggatctatttatatgataaactgtaacttatttaatgattcttttattaattctagtgttacaggaaataatggagtaggtggatcttattattctgaacctaaatacttaaatagtatttccaatattttgagaattaactcaagtgttaatggtgttttggaaagcaatatttatcctgctgattatgatggaaagtactctaatgaagttgtagtgtatgtttctgttaatggtaatgatgaaaatggtaacgggtcttttaataatccttatgctacaatagctaatgcaattgctaaatcagcgggtaatgtatataacttgaaagtgtacttgttagatggaatttatagtggagcaggcaatactaatatcagtttgccaagtagtatgaatattcaaattgcagctattggttctaaagtcataattgatggaagtggttctaattggtttgcagctaatgaaagatcaatttccggatttaaatatgttttatctaatttaaatttaattaattttaaagctaaaagcacaggatataaaaaagaaaataatattggggttatttctaattatgcagatttaactattgataattgtatttttaaaaatattgcaggttcttcaatatccaattatgatttggctaatttaaaggttattaattcatcatttgtagattcaaaacacttgggattctatggtggtgttttatttaattatgatgctaatgcaagattttataattgtattgtaaataattattcttcaacagatattttttattctacagcagttaatacagaaaatgtttatttggagttttttaattcaacatttaaaaatttaaaaagctttgattccagatgtaagtttttaggagcaagtaatacaaatgttactatgagttatgttaattatgcagataatgattgcaattttgcagttgcttatgataaatcctttgtgaaaatagataattctgtatttaaaaatagtaactggttaagcgggtctgttaatggaatgatatggaatgtttataattcctcttttataaatataaactctttaactttcagttcaattaatgattataaaagtaattttaacggatgtctatttgatggaggaaatgtggaatttagaggaaataccataactgttggaaattcaagtttttataataataaagtaatcattgttaataatgataatcaaaagggaaatttagattttaattataattattggattgatgaaactcctaaaaatatgattgatacaactgcaaatgttaaattaaattattggattgttaaacatttatctgcagaaaacttatttaatgatagctataaagtagttatttcttataaattatttgatggaagtgattataaagattatgatgttagatatgttccaataaaaccggttagatttactttaataacttccaaaggaagtaattctttagattccggtacattgattaatgatatctttgaatttattaatacggctaatgatgatagaaatgtagtagttagctttacagataatactaaattaaatataactctttataatcaacataaagtagatactaatatagatttatctcaaaaaacagctaaaatatgggacatagttgaaattaatgtaaatattaaggataataaaacaggattggcagttgatttcggtattgttgaaatttatttaaataataaattaataagttcaaataatgttactggattaactatcagtaaatctatcacagttgatgaaagtaaatcattttataatatttcagttatttataaaggaaataataaatatgcaaattcttcaaattcagctatattaagaatatcttcaattcctcttgaaacagttattatttctaaagatttaactaaatattataaaaacggatcccagtttgatgttgtccttaaagatgttttaggtaatgttctagttggtaaaatagttaaaatcacaattaatggtgttacttataataaaataactaatgataaaggagaagccagattgtctataaaccttttcccaggtgtttataatataactgttttatttgaagatgatgataattatgttaaatcattaaataccaataaaatagttgttttatccaagataattacaaaatttgtagataataataaatttattgttaaattggtaaatgatgatggaactccaaaaacaaatgcttcattagctattattgcaaatggtgttcaatataatcgtattactaatggtagtggtgaagctagacttaatgttagattaaatccgaataattatatttttgctgtaactgatggtcaggaagttgtttcaagttctgttaatgttttatcaacaattgaaactagtgatatttcaatgttttataaagatggaacaaaatattctgttaaattatgtgatcttgatggaaatataatgcctaataaaaatgttgcaattactattaatggtgttacttataataaggtaactgactctaatggtgttgcttatttaaatattaatcttaatcctggtgtttatggtatttcagcaagttatgatggaaaaactgtttataataccatttcaattgcagctatgcctgttactatagtttcatctagtgttaatattcaacaaggtacattttataaagttaaattttctgatgctttgtcaaatccaatcatcggacaaaaagtgggaatgcttgttaatggagtaatgtattatcgtgaaactgatgatttaggtgttgcatctattaagattaatcttaatccgggtcattatatgataacttctggtttattatctaatgcatatgaagctaaaactatgaataatattataacagttagtggaggttacttatga

SEQ ID NO: 82 - protein, 1262 aa, Methanobrevibacter smithii
MRCFMRKKFLTVFFILLFLLCLSVVSATDENTNSSIVAQDYDGNEFYVDLGGDDSNSGQLNSPFNSINKAVEVSNPRDNVVIHLGEGTFEGNGNVMISINKAHLSQGGSITIVGAGADKTIIKGSSAYYAFNIYADSVVTLRDLSIVDCKSVEGGAICNSGTLLVDNCIFRNNFAFNTGGAISSIENGDCKIYNSVFINNSVTCNDEYGNANGGAVYSLKSDLLVDSCRFVGNFAKGNCLNAISGGAIYVGTYLNNVPSVKNSNFINNYVVSTNFRTNWEYAKGGSIYMINCNLFNDSFINSSVTGNNGVGGSYYSEPKYLNSISNILRINSSVNGVLESNIYPADYDGKYSNEVVVYVSVNGNDENGNGSFNNPYATIANAIAKSAGNVYNLKVYLLDGIYSGAGNTNISLPSSMNIQIAAIGSKVIIDGSGSNWFAANERSISGFKYVLSNLNLINFKAKSTGYKKENNIGVISNYADLTIDNCIFKNIAGSSISNYDLANLKVINSSFVDSKHLGFYGGVLFNYDANARFYNCIVNNYSSTDIFYSTAVNTENVYLEFFNSTFKNLKSFDSRCKFLGASNTNVTMSYVNYADNDCNFAVAYDKSFVKIDNSVFKNSNWLSGSVNGMIWNVYNSSFININSLTFSSINDYKSNFNGCLFDGGNVEFRGNTITVGNSSFYNNKVIIVNNDNQKGNLDFNYNYWIDETPKNMIDTTANVKLNYWIVKHLSAENLFNDSYKVVISYKLFDGSDYKDYDVRYVPIKPVRFTLITSKGSNSLDSGTLINDIFEFINTANDDRNVVVSFTDNTKLNITLYNQHKVDTNIDLSQKTAKIWDIVEINVNIKDNKTGLAVDFGIVEIYLNNKLISSNNVTGLTISKSITVDESKSFYNISVIYKGNNKYANSSNSAILRISSIPLETVIISKDLTKYYKNGSQFDVVLKDVLGNVLVGKIVKITINGVTYNKITNDKGEARLSINLFPGVYNITVLFEDDDNYVKSLNTNKIVVLSKIITKFVDNNKFIVKLVNDDGTPKTNASLAIIANGVQYNRITNGSGEARLNVRLNPNNYIFAVTDGQEVVSSSVNVLSTIETSDISMFYKDGTKYSVKLCDLDGNIMPNKNVAITINGVTYNKVTDSNGVAYLNINLNPGVYGISASYDGKTVYNTISIAAMPVTIVSSSVNIQQGTFYKVKFSDALSNPIIGQKVGMLVNGVMYYRETDDLGVASIKINLNPGHYMITSGLLSNAYEAKTMNNIITVSGGYL

SEQ ID NO: 83 - DNA, 5496 bp, Methanobrevibacter smithii
atgaggtttaataaatgtatattattagtaatatatgcaattatagctattatagtattcacaccattatatgctgaaaatagtaataatactatatttacgttaccaagtgatgatgttattgtatgtgataatgtttatactggtaatgtaattactattactgatgataattatggtgattattttgatgtttattcaggtgagatgaatcccgagtctaatatcaatgatggagatagaatacatattggtaatgttacagataaaacatttgttatcaataaacaactagaaatcactactatgcataatggtgatattattaaaaatggttatattaaattagttaaaggtagtgatggttctagtattcatgggttaactattattaatgataaagtaaattatgttgtagatggtatacctagtattgatttaagtggtattggtttattttatacaaataataattatgtatataataattctgttcaattagcagatagtaggggagtatttgcacttcctatgggttcatcatctaataataagatatataaaaataaatttgtaagtacattaagtacttgtgtgcctatgagtgaatgtgataataatctattttatgataattatttccaatcaactgcagctaatgtaatttattataatccgtggggtcatgcaggttatagtggttctggtaagtgttttaataattcatttatcaataattacatgtgttctttaaataggaactctccttgggttattggaatgtctcttttaagtaattgtaatgtaaatattgtaaacaacactatttttaatgttcgtgacggtgttagtggtttaggtgttaattctacaataaatggaaataaatttattggtgtgtctaatttagctttatccgtaagtagtgctaatttaactattgagaataattcattttcagatacatctatggctatagctattttaagtagcaatataactgttaaaaataatataatcgaaaattcttcaattggaatttgggtatttggaaaaaatgcatctttaatatctaatactattagtttagttgatggatattatgcagttaatgttgaaagtgaaaatgttttaattttaaataataatattaaagtgagtaattttggtgaaggaattagagttgctgaaaataatgtatctataataaataatactataagaactgctgttgactctggaatttatatattgtcttctaataatgttattagtggaaataggatatcttctaatttatatggagtttatattgatgcagtatctgatttatattattatactcgtggtgtactaggtgtttcttattatgctaaaattgatcaaggtaaaataaatcataataatattacaaacaatataatcaattcagcttcttacggagtttatctggtagggactgtgtataatacaactattataaataataatattactacaaatgcagctgtaggtattgttgagaatattactgatccattttcaaataatattaaagacaatgttgttaatggtgttcttttaaattatagtggtatagttatcagtgatgataattttaatgtctattttgatgaaaaaggatgttttaaatttgaagatattaattctattgttttggtaattacaaaactttctaataaggacatgttgattaatcaaaaaatgactttattaaatggaggtttagttaatatattaaccaatgttactatttctttagtaactggatcaaatggaacattaattaaatcattgaattttaaaaacacagataaaaatgcgattatcataaataatgtaagtgatataactttagaagacaataatataatgtctgtttctcaaatgaaagatatttttggaatttctttaaatttatcaaataatactgaacttattgataatgatgtatatattactggtgaaaatacattaattcaaggtattttacttaataattctgataatcttacatttgtaaaaaatagtgtgattttagaagctaataaaatagctcagggaattattataaatttattaaattcatctaatttagttaataatacaatccatcttcaaggaaatggtgtttttgattgtgttttaattaatgggtctaataatttgaatattttaggcaataatattatagctaggtctatttctaatgttatttcaccattagcaatttctagttctaaagatattgttttggataaaaataatattagtgcaattggtgatttagtaaaatcattaaatttctcaaatacatctaatgttgttatagaatctagttttattaacttaataggattaagtaaaacagaggtgatttttgcaaatgatgatttaaataatattgaaataactaattgtgtaatttattccaatgctttaggtttgatcagtggaaatatcacattaaaagaaaataaatatgtaatctatgatgataatgttgaaacttactttgattcaaatggtatgtttagtaataagttaataactcaaaaagatgtgttgatgtttgataatttaaaatcaaaacattatactttgacttttaatcaggtggttattttaacttcttattataagaattcattaattgatgcaactttaaatttcaattcaaaatcaagtaattcaactattaaaaatttaaactttgatttagttgaaaatgttgcatttaatttatattttgcattaaatattactattgaaaataataatattaatttagtgtcttctaaagatgtttcagctatcattattactggagaaagttttaataatttaattaacaacaatactgttaaaataaggggtaatggtaccctaactggaattactatttataattattatgatgaatattatggtttaagtccaaaaaataatgtaatttcaaataatgatattgtaatcaattcaaataatgatgtaattgctatttataatgcaatggctgataatacaattattagaaacaataatattagaatagatgcacgtgatcatgcttatggtgtttataatatttattcacaagatttcaaagtattcatgagtactatttggactacaaacacaaaaattatccacaatattattgaaggaaatggatctattgtttgtttaattaattcaattgaagctaaaaacacattagttgataataatacattaatagctatagctaatggttcttatggttatgtaggatataaaacatcaggggatgtattaagatataatgattttacaataaatggaactggaaataatgatttatttatatctaatgtaagtcaaactggtatttatttatcaaatagttcttctaatgcattgattttggaaaatagtattatttctaattatgctcctggaaatgattatgcaatttatgtagaggttaattctagcaaaatttctattgttgataattatttaattagtgataattggaacagatacgctgataatgcaatatatgctccatcagctactttaactaataatgaactttattatgtttatgtatcacctgaaggtagtgatgaattaggtaatgggtctattaataatccatttaaaacaataaaacatgcactaaataaggtaattaataaaggaatagtttatgtactgggaggtaattatactgaagattatattacaatttcaaaaacacttactcttaaaggattaggtaaggttatagttgattgtaaaggtagtttatttaatattactaaatccggttcattaaaagtttttaatattaaatttatgaatgcaaatgcaactacaggttcaacattttacaatttaggaaaactatacttagaaaatgtttcagtaatcaattccacagctttaacttatggtggagctattgttaattatggtgagttaattataagaaactctacattttcatcaaataaagctaaaaatggtggagctatcactaattataataaattagatattaaatcatcaaattttactaataatagttgttatattaaaggctctggaggggctatttataatttagaaaaagctactcttagtattgaagattgtaattttgtaaataataaagttgatgctgaatatcttattgaagaagatgattttggtgttcgtttaggatctggaggagctatttacaatcgtggaaatttatatattattaattcaaatttcaaatctaatagagcatttaattatggtggagctattttaagtgcatctactcaaaaacacgatcttaaagtaatcaattcaacatttgataaaaatacctgttttgcaggtggtggaggagctatgtatattgttaatgcaaatttagacattgctaattcatcatttacatcaaatgaaattggagaaaatagtggtggagctttatgcataagtgaatctgaaggtaaaatttataattccacattctttaaaaactctgcaagttttggtggtggtgcaatacaattttggtcttctgatataactatggatttatgtaatattactgataataatgctggaaaaggtggtgctatatcttattatggtcaacgtattggaaatcatgttgtaggttctctaaatatttataattcaacaatttataataataaaggatttgatagtggtggagcattttatgttagaaatttaaacatgaatgttaaaaattctaatatttatgataactttggaggagatggtaaacatactctttcagttgaaataaattatcctacaaaaccagttaacaatattgatttaaatggtaattggtggggtagtaatagtggccctggagaagatgtttggttaaatgcacaatattacagggaatggattaaagataaaatttcatgggatgtacttaatccgaatcctaatcctaatcctaataaacctggaagcaatacaagacctggtcaatcaaataataatccaattgtaggtccaagtactggaggattattaaacccagggagacctggacaaaatggatttggaacgggtattggaacaggaactggaagtggttttggttctggatctggtaatggtatgggttctggaagtggaactaatgctggtggaagttccggaagtcatggtggaagatttggttctggtagtggatttaatggaacagcctattctaaccaaggcacattaggtgatttaggttcatcttcaagttctggagctggtgggagtgaagcaggatctccatcttcagcttcatcaaataatgcaatttatgaacttaataaagatgttaaaaaagcattgtctggatataatataatttatggaattatatttttaatagtcattatattattaattatatttggatataaacgtaattctaaagaggaggatgaataa

SEQ ID NO: 84 - protein, 1262 aa, Methanobrevibacter smithii; identical to SEQ ID NO: 82

SEQ ID NO: 85 - DNA, 5109 bp, Methanobrevibacter smithii
atgagcaattttaaaccaattttaattttgtctttatttgtattatttatggtttcattaggagctatatctgctgaagatgtaaatgttacagttataagtgattctcaagtagataattcagtatatgttgattcaaatatagttgctaatggaaatgggactattgataatcctataagtaatattaaaaatgctgttgatttagcaaataatgattctacaatttatcttaaaggtggaaattattctggtgtagaaaataatgggataatcattaataaaacattaactattacttcttgtgatggactggctattattaatggtgattataaagattatatattttacattggagataaaggttgtttaactttaaaaaacattagctttgctaatacaaattatttaaatgttaaaacatatggagctattataaattatggtaatcttactgtggaaaatagtttctttgataatgcaactggtttaagagcaggtattatattaaattatggaaatttaactgttactaattctgaatttaagaataatactgcaaaatattatggtggagctataaccaactttggttttgcaaatattgttaattcattatttgaatccaacactgctgctgaaggtgaggctattttaaacagttatgacatgtttatttcaaattcaagatttgttaataataatatttcatcaagtaaatatcaggatgctgaaagtttaatagatatttcatcttcatactttatggaaaattcaggtatctttgttaaagatagtggtatacatattaaagaatcttatttgactttaattaatacaacaaactctattgttgatattagctattcatttatcaatacttatgattttattaactcaaaaatcaatgttgatgataatttatggtgttctaatgaaaacattcctaaacaagctaatagatggttaataatgacttttactgataaaaatactggaagttccataattccatctaaaaccgttactgatgttttagttagttttaaaacatgtaatggaaaatctacatatagtttgccttctagtgttaatttacctcatgtttatattcaacttgaagcagataatggtaaatttaaagaaaatggtggatttttagtaaataatgtattttcaactacttattatggtaattctaaagacacattattatttgcaatgattgatgattattttgctactttaacagtgggatctggtgttaataatgggaaaatatatgtttcaaattcaggttctgatgaaaaaggagatggatctattaataatccatataagtcattagttaaagcagttaatgtagctttaaatggtgacactattttgattgcaaaaggaagttattatggttggaataattctggacttttaattaataaaactttaacattttccagttataatggtgaggttatattatacagagataattttcatacaatgtttacagttacactaagaggaaatttaaatttaatgaaattgaccttaacagctgaagacaaatcaaaattcttcccacttgtaaataactctggaaaaacaattatagataattgtattattaaaaatattgatgggggagataaatataaatataaatcatatcaagcattatcttatcagtattattctaatcaaagtgtaatttacactagtaatgatttatttattaataattcattattcacggatttagaagatattgttattagatcatacttttatactggagataattattttaaacattttgacgtgaatattgaaaattcagtatttactaattgtaaaggttatgcttgggaaactgtatgggatagccaaacatatgctgataaattggatgttgtatctccatcatttataattaatgtaggtgcagaaaatgttttaattaataattgtacttttaaaaacaatttagcatctgttatgcgtgttaatgcctctaaatcatttttagtaaatgcttctaaatttataaataatagaggttctatttattctttaacaaatggtgtgatgaataatacattgataagtgaagataatggtccagttttaagatttgtaactggccatactctttcaataattagaaatatgcaaaatgttattaattcaaatttcactaaaaataatgatgttattataaatacatggtattcttattcagataatgtctatttgtataattgttctttttggaataatagtaataaccatgctcaaggttatggaaatactagtggaaaaggattaatattaaatggtggaaatatgactgtagattactgtacttttgaaaacaattcagtattctatggtggagtgttttataatgatggaacagctatgggtgcaggtggaatttattattctacattaaacattactcgttcagtattttataaaaataatgctgttttaggtaaagatatatttcatagaggtggtaatttagttgtttctgattgttggtggggatctaacagaggaccaaatgatgcgaatatttataatgctgcaggtagtgttgaagttaaaaattgggttatattgacatttgatattcaggataatacattaattgctagtttaaataaagtaacggacaataaaagtaatatttataatataagtggaaatttaccttctagaatagctatctttaactcttcaatggttaaaataaatccaaatgttattccattaatcaataatcaagctaaagtaaatatttcatttaatggtgaagatatttcagctacagttagtatagataatcaaacaatcagtttaatattttataataaaaacactataattgatttaaaagatattattgtttatggtaaaggaactgcatattcatttgttttaaaaagtgtaaatggttatgttatatctaataaaacagttaatttattaattttaaacggaactgatgtttatcaaaatcatacattaataactaatagttttggtgtagctagtttaattcttaattgtagtatgggtaattatacttttaaagctagttataagggtgatgattactttaaacctgttcagaatagtgctaatttggttgtaatgccttattatacttctgtatttgttaaaagtaatcaaacattttatggtaatggtaatttcttatatatgtatctttatgataatttaggtgatgctgttgttaatcaaatagttttatttactataactagttcaaatggtattgtttataagaagtatgctcttactaattgggaaggtcaagcaggattctaccttaatttatctggtggaaattataatgttaatgtaagttattctggtgataattggcattatgggtcttcaagtactggtttatttaatatattatctattggaactaatgtaatcattgaacagtctttatttaatggtaggggtaatactttaacagtattacttagagataataactatagggttttatttaatgaaactttatctattactttatctgatggtaaaattgcacaaacatttgatgttactactaatgaaaatggacgtgcagggattattgttaatttacttccgggtaaatacaatgtttatgtgaaatatggtggagataagttaaactttgcatcttctagtgaaggtgatttaattattaatcctgttggcactcaaatttctgcagattccgttgttatttttaatagaacggttaataattatcttgttaaattaactgatatttatggacgtttgcttgttaatgagactgttgttattacatcaattagtcaaagtactggggttaaacagatatttaaagttaaaacaaatgatgaaggaatagctaatttaacatgtaagttagatattggttattatttattgaaagttaactttgaggataatgaatggtatggtggcagtaattatgcaagtactttaattgtagctgatactgttagtgattttaatccatatgctactattttagttgctaatgactttaataagtattataagaatgctactcaatatgttgttcgtttgcaggatatttatggtaatcctatttcagatatggatgttgttatttgtgttaatggtgtaaattataatagaataaccaacagttctggtgaggctaaattaaatattaatttgtatcctggaatgtattatgtaagtacaagttttggaggttgtggaaattggactaaatcatttgttaatagttcagttacagttttgtctcaaattatttcacatgatttaactaaaattttaagaaatggaagtcaatttattgttaaatttgttgataatgctggaaatcctattggaggcaaaacaatagatatttctattaatggaattgtttattcccgtattactaatagttctggtgaggctaaattaaatattaatcttaatcctggtaaatatgaggttataacttcttgtggtgattttgttaatcataatatggttaatgttttatctaacatagaaagtgatgatctttcaatgtactataaagatgggtctaaatttaaagtagttatctatgatagtgaaggtaaagttaaacctaatgcaactgttaaatttaccattaatggtgtttcttatgttaaaactactgataatgatggtatagcggctttaagcattaatttaaattctaatatttatacaataacgactgaatataatggtgttgttaatactaatcaaatttggatttataatatggcagttaatataggtgctgttaatgaaacagttgaaaggggcaattctttttgtgtaaaattaagtgatgttaatggaaatgtattgtctggtggacaagtgacatttaaagttaacggagtttcatatattaaacaggttaatgaaacaggttatgcaaaattaaatattaatcttaaccctggagtatataaaattatcacagcattttctattagaaactatgaagataaactagtttataataccttaaatgtgacaagtcattaa

SEQ ID NO: 86 - protein, 1702 aa, Methanobrevibacter smithii
MSNFKPILILSLFVLFMVSLGAISAEDVNVTVISDSQVDNSVYVDSNIVANGNGTIDNPISNIKNAVDLANNDSTIYLKGGNYSGVENNGIIINKTLTITSCDGLAIINGDYKDYIFYIGDKGCLTLKNISFANTNYLNVKTYGAIINYGNLTVENSFFDNATGLRAGIILNYGNLTVTNSEFKNNTAKYYGGAITNFGFANIVNSLFESNTAAEGEAILNSYDMFISNSRFVNNNISSSKYQDAESLIDISSSYFMENSGIFVKDSGIHIKESYLTLINTTNSIVDISYSFINTYDFINSKINVDDNLWCSNENIPKQANRWLIMTFTDKNTGSSIIPSKTVTDVLVSFKTCNGKSTYSLPSSVNLPHVYIQLEADNGKFKENGGFLVNNVFSTTYYGNSKDTLLFAMIDDYFATLTVGSGVNNGKIYVSNSGSDEKGDGSINNPYKSLVKAVNVALNGDTILIAKGSYYGWNNSGLLINKTLTFSSYNGEVILYRDNFHTMFTVTLRGNLNLMKLTLTAEDKSKFFPLVNNSGKTIIDNCIIKNIDGGDKYKYKSYQALSYQYYSNQSVIYTSNDLFINNSLFTDLEDIVIRSYFYTGDNYFKHFDVNIENSVFTNCKGYAWETVWDSQTYADKLDVVSPSFIINVGAENVLINNCTFKNNLASVMRVNASKSFLVNASKFINNRGSIYSLTNGVMNNTLISEDNGPVLRFVTGHTLSIIRNMQNVINSNFTKNNDVIINTWYSYSDNVYLYNCSFWNNSNNHAQGYGNTSGKGLILNGGNMTVDYCTFENNSVFYGGVFYNDGTAMGAGGIYYSTLNITRSVFYKNNAVLGKDIFHRGGNLVVSDCWWGSNRGPNDANIYNAAGSVEVKNWVILTFDIQDNTLIASLNKVTDNKSNIYNISGNLPSRIAIFNSSMVKINPNVIPLINNQAKVNISFNGEDISATVSIDNQTISLIFYNKNTIIDLKDIIVYGKGTAYSFVLKSVNGYVISNKTVNLLILNGTDVYQNHTLITNSFGVASLILNCSMGNYTFKASYKGDDYFKPVQNSANLVVMPYYTSVFVKSNQTFYGNGNFLYMYLYDNLGDAVVNQIVLFTITSSNGIVYKKYALTNWEGQAGFYLNLSGGNYNVNVSYSGDNWHYGSSSTGLFNILSIGTNVIIEQSLFNGRGNTLTVLLRDNNYRVLFNETLSITLSDGKIAQTFDVTTNENGRAGIIVNLLPGKYNVYVKYGGDKLNFASSSEGDLIINPVGTQISADSVVIFNRTVNNYLVKLTDIYGRLLVNETVVITSISQSTGVKQIFKVKTNDEGIANLTCKLDIGYYLLKVNFEDNEWYGGSNYASTLIVADTVSDFNPYATILVANDFNKYYKNATQYVVRLQDIYGNPISDMDVVICVNGVNYNRITNSSGEAKLNINLYPGMYYVSTSFGGCGNWTKSFVNSSVTVLSQIISHDLTKILRNGSQFIVKFVDNAGNPIGGKTIDISINGIVYSRITNSSGEAKLNINLNPGKYEVITSCGDFVNHNMVNVLSNIESDDLSMYYKDGSKFKVVIYDSEGKVKPNATVKFTINGVSYVKTTDNDGIAALSINLNSNIYTITTEYNGVVNTNQIWIYNMAVNIGAVNETVERGNSFCVKLSDVNGNVLSGGQVTFKVNGVSYIKQVNETGYAKLNINLNPGVYKIITAFSIRNYEDKLVYNTLNVTSH

SEQ ID NO: 87 - DNA, 5655 bp, Methanobrevibacter smithii
atgttaaggaggaataaaaacttgaaaaataaatttgcaatattaattttgttaatattgtttatggtatctatttcttgtgttagtgcagaagataatgattcttctaatattctaactgatggtgcttctgatatttatgttagcccatctggaaatgatgctaatgttggagatatgaataatcctgttgctacaattaataaagcaattaattcaactgcaactaatattcatttatccgaaggaaaattcactggtactggtaataatggtttaacaattgaaaataaaaccataactattgtgggtgctggtattgataaaactataattgatttaaacggaactcaatttatggatattaaatctactagttctgtagttttaactaatttaactataataaacggttattcaaattatggtggagctatttataatgacggtaatttaactattcaaaattgtaactttaaaaataactcagctagttctggtggggcgatttacaacaatggcaatttagacatatattattctacttttgaagataattttgttaaatatagtggtggtgctatttgttcttataagtatgcaactattcaagattctacttttttaagaaatataggtactgccacatcttcaaatggaggttctgtttatattagtggtaataatgataaatattccattttgaatagaaataaatttaaagatactcaggctttaagaaatggtggtgcactttatgtaaattatgcaaatgttactaattgtatttttgaaaatgcatcaattacttctacaggttcaagtaatggtggtggagctatttatggttctaactttaatcttaaaaacaacactatgactaattgtgtatctaaaagtggatatggaaattacatttggtcaacttctagctttaatggggtagttacagttcttgatggtaaaaatgtagatataactagttctacttttactcttaatgcaactgcaactgatgatatgggtcatccaattcatggtggatattatacctttaaatttaatgatgtttttgttggcggtgcaaactctgttaatggatttataaatggcacattttctaaattatttgataatggtaaatatactgttacagtttcaggtcctttaaatgataatgcagttgttaaaacagctactgtaaatgttaaaattgaccgtgactatgtggattattatgtatcacctaatggtgatgataataatactggttcaaaagataatccatttaaaaccattaataaagcaataactgaagcttttgctaaaaatatctatgtaaacatacatcttttagaaggaacttatgtaggtgctggaaatcttaatttaacatttaataacttaggttaccttaacataattggtgtagacggtaaaacaatcattaacggttctaataaagattgggcatttaattttggaagtacattaaatgttaatattataaatattacatttgctaatttatatcaaaataattatgtaggtttaattaaagcaagtggaaatgattatactgtaaacattgataattgtgtctttgaaaaatgtaatacaaagtatataatttatattactaatggtgagataaataatgtaataatgagagagaatattataactggatgtgttattagtggaggtactagtataactaatcttttatttgaaaataattctggttccgcttatttcacaaatattaaaaaaggagtttacaattctactttcataaacaacaaaattaatcagggtaatgattatggattattctatatatcttccaaaaactttgtatcaagcaataatatatttgaaaataatacaattaaagcactatatatttcagcatataatgatattaattttacaagtataaatgatacttttaaaaataatgttgcaaaaaatggtggtgctgttagtggtggcggaacttttattaatgctaaatttattaataatacagctactcaaaaaggtggagctatttaccataatgctatggttttagttttaaaaaattgtatttttgaaaacaataaagcagatgacggtaatgatatatatggttttatgagtactaatgttagaattaatccacttttaaacatgtctaattctttaaaattcgtatctaccaattcttcaaatgttaaatctgaattaaaagctatttttgatttaggtggtattcaagtaagtggttataatgttaaattctatttaaatggaacttacaaaggctcagctcctttaattgataatgtagctactttaatagctattgctgaagatggaaaatacgaaatttccggttctgttgatcaagttaataaaactaatgttgttactggtattttaaatgttaatgctaatcctgcaagtgtttttgatgtttatgtttctgaaaaaggtagtgatgaatcaggtgatggttcattagctaaaccatttgcaactattaaaaaagcatttgattatggaatgaatcaaaatgcattaagtttaacaatccatttaattggcactttaaaaggtgaaggtaatgttaaacttgatttaaaaccatatgtggatttaactattgttggtgagaataaagaaacttcaattattgatgcagaaaaaaatatttatgtatttgattttgtaccaatgtatgatgatgttaaagtttatttatcaaacttaacaattaaaaatggtgtaactaacaagtatccttctggaggtgttagttttacagtggacactggtcttgttcgcagtactggtttttatttaaatgttaataactgtatatttatgaataatacaggttatggaatttccgcagataaattattctcaactattgtaattaataatactaaatttatagaatctcgtggagcattctattcttatcaagcagcattaaatattattatatcaaatactgaatttttaaaaaataatttggttgtagaaaataataggggaaaattagtttgtttaaatggtttaatttcaattagggatattctttcaaaaggtagtagtaattataattatcattttaatattacacaagtgttatttgataatgtgacttttgacggaaatcataatgttactggtactgctaagcctagtgctctttatttagtaggtacaaatactactataattaattctaagtttacaaatcaaaaagatatttcagctataggtgtatttagtaattatgatactggatgtaatgtaactatttataatacttattttgaaaacaatacaagagatattatttatggatattcatctcaaggtgattatcgtccaattattatattaaataattcaacatttgttaatagtggagcatttacatggccagatcctcgttatcaaaatgcatggtgggttgttaacaatactaaatttattaacatgaccaatatgatgatatttaaagggtcagtatctagttcttataaggataatccattaccgttaggagttaataatactgtaactattatgaattcattattcttaaacaataaaaacggtgttgaatttggtaatggtaatatttcaggatctagtttctataataccccagtatttgtatctttaactagtggtagtcaacctcctgcatgtattgtttacttaaacaataatttctggaatagttcagtacctatatataatgttaccactcctgctagagctactgtttattgtgatagttggttagttccagcattagttacagacaatgcttctggtccggttcaaactattaaacttgtatatttagcatttaatggaactgattattcttattatgatgtttctaaagtacctattttggatgttaatgctagtttaacagtttctaatggtgtaattactccaaataaaggtgttcttaactctaatggtttaactgctaattatacatataatggtgttggtaatcaagttgtaactgcaactttaagtgatggaaatattttaaaattaaatgtaactttctacagaattgatacatttacaaatatgactatttcaaataatgttccgcaaactggagattatattactgttaatgttgttgttcgtgataagaatggtaaacttttaaatggtagtgtgaatgtttatcttaatagtgttttaaaaggaactatcagtttaataaatggtatgggttcctttgatgtgttagcagaaaaaactggtccttgtgaaatatttgttaattatactggagatttagataattcttactcaagtaatatgactattgtttcagttaaaaatacacaaatgaatgtttctgtttctgattcagattctgcaagtaatgttacttttactgtggactttgatcatgtagctaatggttttgtatttgtaactattggtggtgtaacttacaatgctactgtttcaggtaaagaagctaaagttattgtacctccgttagctgtaggtaaatatgatgctattgtttcatataatggtgttgttaataaaactgttgcagttaacatatctcctgatagaaatccagtattaaacatttcagatattgtgatgatttacaaagacggtaccagaatggttgctgttttaactgattatttaggtaatcctattgctaatgctattgtatactttactattaatggtcaaacttacaataaaaccactgatgttaatggtactgcttccatgggattaaacttagcgtctaatgtgtacaaagctactgtttcatataatggttcagataagtataatgcagtttctaaaaacattactgtaactattaatccgactattgtagctgatgatttggttaaaatgtatcagaatgctaccagattctatgctaaattcactgacagcactggaaaagcaatagctaataaggaaatcagatttaatattaatggtgttttctatactaaaaagactgataaggatggtgtagctgatttaggtattatgttaagacctggaaattacattttaactgcttacaaccctgtaaccggtgaagaaaaaggatttaacataaccgtaaaatcattaatcatgcaaaatgacttaaccaaatattacttaaatgcttccagatttgaagcaactgtctacaataaagacggatctttagcagtaaacaaagaagtaacatttaacatcaacggtgtgttctatcacaaaaaaacagatgaaaatggtgttgcaagcttgggaattgctttaagacctggagaatatactattacaacaatgtatgatggtttggatattggaaacaaagtcactgtcatgccaactttagtaacaaaagatctctccatgaagtaccttgacggcagcaatttcactgctttaactttagatggtcaaggtaaaccattagctaaccaaaacgtatcatttaacgtaaatggtgtcttctatcacaaagttactaataaagacggtattgcaagcttaggaatcagattaatgagtggtgagtatattattacttcctactggaatgatttccaaacaggaaacacaataaaaatcagtccttaa

SEQ ID NO: 88 - protein, 1884 aa, Methanobrevibacter smithii
MLRRNKNLKNKFAILILLILFMVSISCVSAEDNDSSNILTDGASDIYVSPSGNDANVGDMNNPVATINKAINSTATNIHLSEGKFTGTGNNGLTIENKTITIVGAGIDKTIIDLNGTQFMDIKSTSSVVLTNLTIINGYSNYGGAIYNDGNLTIQNCNFKNNSASSGGAIYNNGNLDIYYSTFEDNFVKYSGGAICSYKYATIQDSTFLRNIGTATSSNGGSVYISGNNDKYSILNRNKFKDTQALRNGGALYVNYANVTNCIFENASITSTGSSNGGGAIYGSNFNLKNNTMTNCVSKSGYGNYIWSTSSFNGVVTVLDGKNVDITSSTFTLNATATDDMGHPIHGGYYTFKFNDVFVGGANSVNGFINGTFSKLFDNGKYTVTVSGPLNDNAVVKTATVNVKIDRDYVDYYVSPNGDDNNTGSKDNPFKTINKAITEAFAKNIYVNIHLLEGTYVGAGNLNLTFNNLGYLNIIGVDGKTIINGSNKDWAFNFGSTLNVNIINITFANLYQNNYVGLIKASGNDYTVNIDNCVFEKCNTKYIIYITNGEINNVIMRENIITGCVISGGTSITNLLFENNSGSAYFTNIKKGVYNSTFINNKINQGNDYGLFYISSKNFVSSNNIFENNTIKALYISAYNDINFTSINDTFKNNVAKNGGAVSGGGTFINAKFINNTATQKGGAIYHNAMVLVLKNCIFENNKADDGNDIYGFMSTNVRINPLLNMSNSLKFVSTNSSNVKSELKAIFDLGGIQVSGYNVKFYLNGTYKGSAPLIDNVATLIAIAEDGKYEISGSVDQVNKTNVVTGILNVNANPASVFDVYVSEKGSDESGDGSLAKPFATIKKAFDYGMNQNALSLTIHLIGTLKGEGNVKLDLKPYVDLTIVGENKETSIIDAEKNIYVFDFVPMYDDVKVYLSNLTIKNGVTNKYPSGGVSFTVDTGLVRSTGFYLNVNNCIFMNNTGYGISADKLFSTIVINNTKFIESRGAFYSYQAALNIIISNTEFLKNNLVVENNRGKLVCLNGLISIRDILSKGSSNYNYHFNITQVLFDNVTFDGNHNVTGTAKPSALYLVGTNTTIINSKFTNQKDISAIGVFSNYDTGCNVTIYNTYFENNTRDIIYGYSSQGDYRPIIILNNSTFVNSGAFTWPDPRYQNAWWVVNNTKFINMTNMMIFKGSVSSSYKDNPLPLGVNNTVTIMNSLFLNNKNGVEFGNGNISGSSFYNTPVFVSLTSGSQPPACIVYLNNNFWNSSVPIYNVTTPARATVYCDSWLVPALVTDNASGPVQTIKLVYLAFNGTDYSYYDVSKVPILDVNASLTVSNGVITPNKGVLNSNGLTANYTYNGVGNQVVTATLSDGNILKLNVTFYRIDTFTNMTISNNVPQTGDYITVNVVVRDKNGKLLNGSVNVYLNSVLKGTISLINGMGSFDVLAEKTGPCEIFVNYTGDLDNSYSSNMTIVSVKNTQMNVSVSDSDSASNVTFTVDFDHVANGFVFVTIGGVTYNATVSGKEAKVIVPPLAVGKYDAIVSYNGVVNKTVAVNISPDRNPVLNISDIVMIYKDGTRMVAVLTDYLGNPIANAIVYFTINGQTYNKTTDVNGTASMGLNLASNVYKATVSYNGSDKYNAVSKNITVTINPTIVADDLVKMYQNATRFYAKFTDSTGKAIANKEIRFNINGVFYTKKTDKDGVADLGIMLRPGNYILTAYNPVTGEEKGFNITVKSLIMQNDLTKYYLNASRFEATVYNKDGSLAVNKEVTFNINGVFYHKKTDENGVASLGIALRPGEYTITTMYDGLDIGNKVTVMPTLVTKDLSMKYLDGSNFTALTLDGQGKPLANQNVSFNVNGVFYHKVTNKDGIASLGIRLMSGEYIITSYWNDFQTGNTIKISP

SEQ ID NO: 89 - DNA, 2247 bp, Methanobrevibacter smithii
ttggaatataataacagtgaaaatgggaaaaatttaaatgatacttctaatgtgttatatgatggaaaagatggaagtgttttagaaaataaaaacagtaatgatgctatttttaagtatgatgggaataatactgttgtatctaaagaaaagcctaaaatgaatgtaattgctgaggatagtataatatttggtgaaaatttaactgttaaagttgaattacctaaagatgctaatcctagttgggtgctgatgtctgttggtgaaatttattattatgttaaaattgacgatgaaggcgtatcattatggaatatgaccggtttagaagcaggtattcaatatattaaaattggatatcggggcaataataaatatgaagcagttgaagttttccatactgtaaatgttattaaagctaatctaaatcttaatgtatttattaaagatgttaactatggtgaaaatttaactatttatgctactttaaatggtgtaaataatactaatttaactggtaatgtaattgtaacaattaataataaaaattattctgtagtagttattaacggtaagggaaatgtttctgctgataagctacctgctggattgtataatttcagtgctacatgggctggaaatgataactataatggaactaatatttctggtggctttaaaattaataaaatagattctacaattgccattaatgttgaagatattaaagttggtgaaaatgcaactattattgttaatttagatagtgatgctacgggcaatgtaactattacacttgataatcagaactatacagtagctattaatgaaggtcagacaattaaagtaataggcggacttaaagcaggcacttatgatgtatttgttaaatatataggtgataacaattataatagtgctcaaaacacaactaaatttactgtattgaaaatatctgattataatatggatgtcactgttcctgaatttaaagagggagtaaattctactgttggtgtggatttacctaaagatgcagaaggtactgttactgttgaaatcgaaggtaaaaaatacactgcaaacataattaatggaactgcaaaagtaaatattcctggattagatgttggagattataatatcactacaacttactctggtgatgctaaatatgtttccatgactaaaaaaggaaacataaccgtaattccaaatatggatgtaaacttatatgttgatgatgttgtaatgatttatcatgatggaactcgtttagttgctaaattaacagattaccaaggtaggccaattgttaatgatattatatattttactattaatggtaaaacttatgctaaaactactgatgataatggtactgtttctatgggacttaatttagattctaaagtatatacagcaactgtgtcatataatgaatctgaggtatacagtaaaatatccaagaatgttactgtaactattaatccgactgttataagtgaagatttagttaaaatgtatcaaaatgatactagattctatgttaagttcactgacagcacaggaaaagcattaactaagactactgttaaatttaacattcatggtgtattctacactaaaaagactgataaagatggtgtagctgatttaggtattatgttaagacctggtgagtacattttaactgcttacaatcctgtaactggtgaagaaaaaggatttaacataacagtaaaatctttaattgtacaaagtgacttaactaaatattacttaaacaattctaaattccaagcaactatttatgataaaaacggatctttagcagtaggtaaaaatgtaactttcaacatcaatggtgtattttacactaaaataactgattcaaatggtgtagtaagtttagcaattaatttaaggcctggagaatacattattacaacaatgtatgaaggattagctgtaggtaacaatatagttgttttacctactttagttactcgtgaccttaatatgacttatggagatggcagtaactttactgcacagacattagacggtcaaggtaaaccattagctaatcaaaatgttacatttaacataaatggtgtgttttataataaagttactaatgataatggtgttgcttcattaactatgagattaatgagtggaaaatatattattacatcttactggaatgacttccaaacaggaaatacaataataatatcttaa

SEQ ID NO: 90 - protein, 747 aa, Methanobrevibacter smithii
MEYNNSENGKNLNDTSNVLYDGKDGSVLENKNSNDAIFKYDGNNTVVSKEKPKMNVIAEDSIIFGENLTVKVELPKDANPSWVLMSVGEIYYYVKIDDEGVSLWNMTGLEAGIQYIKIGYRGNNKYEAVEVFHTVNVIKANLNLNVFIKDVNYGENLTIYATLNGVNNTNLTGNVIVTINNKNYSVVVINGKGNVSADKLPAGLYNFSATWAGNDNYNGTNISGGFKINKIDSTIAINVEDIKVGENATIIVNLDSDATGNVTITLDNQNYTVAINEGQTIKVIGGLKAGTYDVFVKYIGDNNYNSAQNTTKFTVLKISDYNMDVTVPEFKEGVNSTVGVDLPKDAEGTVTVEIEGKKYTANIINGTAKVNIPGLDVGDYNITTTYSGDAKYVSMTKKGNITVIPNMDVNLYVDDVVMIYHDGTRLVAKLTDYQGRPIVNDIIYFTINGKTYAKTTDDNGTVSMGLNLDSKVYTATVSYNESEVYSKISKNVTVTINPTVISEDLVKMYQNDTRFYVKFTDSTGKALTKTTVKFNIHGVFYTKKTDKDGVADLGIMLRPGEYILTANPVTGEEKGFNITVKSLIVQSDLTKYYLNNSKFQATIYDKNGSLAVGKNVTFNINGVFYTKITDSNGVVSLAINLRPGEYIITTMYEGLAVGNNIVVLPTLVTRDLNMTYGDGSNFTAQTLDGQGKPLANQNVTFNINGVFYNKVTNDNGVASLTMRLMSGKYIITSYWNDFQTGNTIIIS

SEQ ID NO: 91 - DNA, 3024 bp, Methanobrevibacter smithii
atgaatgttaaaaacaaatttttttttatattggttgcattgattgttggtttgttaacaattaatggtgcatttgcagaaacagctgattcaatgcctgaaattgatcagggtactgtttcaggtgatgcagaattaataagcacaaacccttggagtaccacaggaagtcttgaatatacaattcctgatggtgtgcaggaaattacttctgctaaggtaattgtaaatatctattcaggtagtggaaattcggaaacctatgctttacactcaaatactacattaaacacagcaggaaatagtaaggtattgggatatgaaaatttaacttatgttggtaatcaggctggtgatccgaatgtgtatgtgattaataatcatactacaaaacagtattctgattatcaaatggtttatgatgttttaggtgatttaaaatatttaggtcctaattcaaaaattaaaatagatgtatctagcactccatttgaaggtaaagcttttgatggacgaataaaaatgattggattatttattgcatataatgacggggacagcgatagtatcacatattggttaaatgtaggaatgtcatggactcagggcactgtaagcaatttaatttatacaaaaaattacactggtgacataggggaagttaactttgaagcaataatgttgtctagcaataacggagcatataagtttaatgataatcaactgtttattccagaagacactattgtgaaagattattatatatataataaatgggatgttacagattatttccaaaaaggtgataatagtgattttacatattctgcattatctcagggatatggttctattaaatcaagtgttcaattacttaaagtgattaacagagaatctcctgtggttactactaatattgcttcagaatataaaaattctatttatgctggtgttactaataatttaactattacagttaacagcattaacaaggatttaactaatgtaactgtttatgtttatgataatggccgtgttgttggttcttatttggttgattttgtaaaagctaattcttccaaatcagtaaatataatagattcttttattagaccaattgatgaaaatactgttttaggaaacaataataccaatgttgtttacagagttattgttgaagataaaaacggtattttaaatgacaccaacagcagtaattttatggtggtttataacggtaatttaggaaaagatttggcatatcctgccatgaatgctacaattacacgtgtttatgatattactggtgatgtaattattttaaataaagatgattcatcatatttaggatccaaaagtacaaatggaagcgacacatggaatattgattttaaaggggagttaaaagaaggattgttatatgtttcatataattggaataagcaagctgatgtaagtgattggatagttactttcaataataaaatcattacaccaattgcccattaccgtgaccagtctaatttaggagcatacggcaaacacggctacggacttgcagtttataatgttacagatttaatcaataaaggattaaatacttttactttaaataaaacaagtggtttaactgctgtttatccaagttctttattacttttaactaataatgaaaatggtgctagtaaaactgtttatatgagtgaaggtgcagatttactttctaaaacaaataataaaaatttggatgtcggagcttatactaaatttaacattgactccacttcaatgattaactccacattatatgtttttgcagcaggcggacaaaaaaatgaaggaaacattgtttttaatggtgaaataaaaagtgatgtatggaataagacttcaaattcaattgattattatactttcaacaccgatggtttaactaaagacaataacactgtatttttccagtctacaggttcaactattcttgcattacatcagatacttgttgtagaacgtgaaaacatacagttagcagttgaagatcttgaaaaatattatggcggatcagaaagacttaatgctactttaaaagatggtgctggaaatccgatagctaataaaaccattacatttactgtaaatggtaaaaaatacaataaaacaactgattccaatggatttgcatcattggcaattggcctaatgcctggaacatatgatgtaacaacaatgtacggcaatatgtctgtttattcaaaagttgttgttaaaaccactattgaaggtaaagaccttgttaaaatgtataaaaatgaaactcaattctttgcaactttcttaggtactgatggcaaaccgttatctaacattgatgtaacatttaacattaatggtgtattttacacacgtcaaacaaatgaaaatggtgtagctaggttaaatattaatttaagacctgatgtgtatattttaactgctattaattcagttactggtgaaagtaaaggatttaatataactgttaaatctttaattgagtcaaatgatttaaccaagtactacagaaatgattctaattttgaagtaaaaatttacaataaagacggaactcttgcaataaacaaagaggttacatttaatattaatggtgtattctatcaaaaaaccacagacagcaatggtatagccaggttaggcattgctttaagacctggaaattatataatcaccactatcgttgacggtctggatataggtaataatataaatgtattgccgactttagtaacaagtgatctttccatgaaatatcttgacggcagcaactttactgtgcagacattagacggtcggggcaatccgttagctaagcaaaatatatcatttaatataaatggtagattctattacagagtaactgatgatgaaggtatggcgtcattgaatataagattaatgcctggagaatatatcattacttcatattggaatgatttcgaagttggaaatacagtaaaagtagattaa

SEQ ID NO: 92 - protein, 1007 aa, Methanobrevibacter smithii
MNVKNKFFFILVALIVGLLTINGAFAETADSMPEIDQGTVSGDAELISTNPWSTTGSLEYTIPDGVQEITSAKVIVNIYSGSGNSETYALHSNTTLNTAGNSKVLGYENLTYVGNQAGDPNVYVINNHTTKQYSDYQMVYDVLGDLKYLGPNSKIKIDVSSTPFEGKAFDGRIKMIGLFIAYNDGDSDSITYWLNVGMSWTQGTVSNLIYTKNYTGDIGEVNFEAIMLSSNNGAYKFNDNQLFIPEDTIVKDYYIYNKWDVTDYFQKGDNSDFTYSALSQGYGSIKSSVQLLKVINRESPVVTTNIASEYKNSIYAGVTNNLTITVNSINKDLTNVTVYVYDNGRVVGSYLVDFVKANSSKSVNIIDSFIRPIDENTVLGNNNTNVVYRVIVEDKNGILNDTNSSNFMVVYNGNLGKDLAYPAMNATITRVYDITGDVIILNKDDSSYLGSKSTNGSDTWNIDFKGELKEGLLYVSYNWNKQADVSDWIVTFNNKIITPIAHYRDQSNLGAYGKHGYGLAVYNVTDLINKGLNTFTLNKTSGLTAVYPSSLLLLTNNENGASKTVYMSEGADLLSKTNNKNLDVGAYTKFNIDSTSMINSTLYVFAAGGQKNEGNIVFNGEIKSDVWNKTSNSIDYYTFNTDGLTKDNNTVFFQSTGSTILALHQILVVERENIQLAVEDLEKYYGGSERLNATLKDGAGNPIANKTITFTVNGKKYNKTTDSNGFASLAIGLMPGTYDVTTMYGNMSVYSKVVVKTTIEGKDLVKMYKNETQFFATFLGTDGKPLSNIDVTFNINGVFYTRQTNENGVARLNINLRPDVYILTAINSVTGESKGFNITVKSLIESNDLTKYYRNDSNFEVKIYNKDGTLAINKEVTFNINGVFYQKTTDSNGIARLGIALRPGNYIITTIVDGLDIGNNINVLPTLVTSDLSMKYLDGSNFTVQTLDGRGNPLAKQNISFNINGRFYYRVTDDEGMASLNIRLMPGEYIITSYWNDFEVGNTVKVD

SEQ ID NO: 93 - DNA, 4305 bp, Methanobrevibacter smithii
atgattgttccatctgcttttgctagtgatgctgttgataaccagacagtcattagcagtgatgaacagattgaaatttctgctgttgatgacggtggagttatttacagtcatggtgaagatactaacgttcttacaggttctaatgatatatatttcaatgcatctgctgaaagtgacgggagaggaacacaatccagtccatacaagtacctgcagtataacagattaacttcaggctgtactgcccatttcgcagacggtacttatgagctggattctaaaaaaggaatatattcttccatgactttcatgggtcagagtgctcaaaatactatcattaagtttaatggtattgcttttaatgttggagatggctatactttaactttaaaagatttaacattggatcatgcaactgttaagaatttgggtactgttagtgcaactaatgtaatatttaaaaacggtgtagctgttgatgatacttcttacggatatgataatgcatacggaggagctatctacaattatgtcagtactgattattacggttatgtgactaatgtgcctaaaaatacattgtataattgtacatttctaaataacagtgcgatgtatgggggagccatttatctgccttacggggaattatctctttcaaattgtaagtttattaataactctgcacattggtttggcggagctatagcttctgataaggattctaaaatttctgttgtcggcactgtttttgaaaactgccgttctgtagatgatgcaggaggagctatttatgcattttctactgatctggaagttagagacagtacttttaataattgttctgcaaactttgcaggagctatctgtagtttaaattctgaaattttaatttcttattctaattttacaaataatcttgcaagatatgaaggtggagcagtatataaaatgtatggttcaggaactgttataaagtccaactttactaaaaatgctgctttaaacggaggcgcattatttagcgataactgtacttcttttgaaattaaaaactctgaatttgcatcaaatgcagcaacaggatttggaggagcaatattttccaatgcaaatcctaaacttacagttgatggagttacatttactgacaataaagccagttacaatgccaacatgttaaatcagtctaatttcagtcctattgtatcaagcaccaataattactcattatttgtttacaaatcattatttaatggtacattgcctgcaagatataatttagctgaaaatggttttgtaactgatgttaaaaatcagcaggattcaggtaactgctgggcatttgcagcacttgcttcacttgaaacctgtgttttaaaagcaagcaataaaacatttaatttttctgtggaaaacatgaaaaatttaattgaaatgtattctgcctacggctggaaaatggaaactaacgagggtggatataacggaatgccgatgggttatttggctagctggttaggtccggttaatgctactttggatccatttgatgataagggaactttatctccgcttttagacagtgaaatgcatattcaaaacatttatgttttgcctgcacgtacaagttacactgataatgatgctataaaagaagctattttaaaatacggcggattatatgcttcatattatcactcagcaggttatcttaattctaaaactaatgcttattatgatccatacacaggtaatggaaaccatgcaattactgtagttggctgggatgacgattattcaaaaaataatttctatactgctcctgcaggtgatggtgcatttatagttaaaaacagctggggaagttcctggggagataatggttacttctacatttcttactatgatagagttttatttgctgtaaataaagataatcaggcatttacctacattttaaatgatactgtaagatacaccaaaaactatcagtacgatgttgcaggaatgactgattacttaataaccggtaaaaaaactgtatggtataagaatatttataatgcaacaggtaatgaggcaattgctgctgtatcaacattcttcaatacaactgttgattacgaaatttctatttatgtaaatgatgtattgcagcttacccaaaacggcagacatgaaggaagcgggtattatactattccattaaaagaatatgttcctgtagctgttggggatatcttcaaaattgttgtaaaacttgcaaatcctcaaaacggatatgctgctgttcctatttcagaacaactttcaacaaccagatgttattatgctccaggtgtatcatacttcagtaatgacggtaaaaaatggacagatttatatgattactcagcttcagcttatagccacacatataattctcaggtagcctgtcttaaagcatttactgttgctgatatgcagaatacaacagttactttaaataacattgctcctaaagttcaggagttcagtgaaattatagctactgtaactgacggtaaaggcaaaatggctaaaatcggtgaagttattttcagcattaacggaactaattatacagctggtgtagttgacggtgttgcaaagattaatgtatactttgatgaagttggagattatgtaatttcagctaactataaaaataacggattgtataacggatctttcgttcaaaaaaccgtcagcgttaccaaaaccgatgttaatttaactgcttatattggcgatattgtttatggtgaaaaccctattgtcagtattaatgtaacttcagtagctggtgttaatgtaacaggtgatgttgttttaacaatcagcggcaaaaaatatattgttaatgttgtcaacgctttggctgtatttgaaatacctgaaatgttggatgccggagaatatcatattgatgtatcttatttgggcagtgaaaaatataatactgctgatggcactgctgattttacagtagctaaaaaagaaatcaccatgaatgtaactatagataaagattacagagacataacagtaaatgttaacttgtctgaaaaacttgatggaaatttaacagttcttgtaaataatacaccttacacattatcttacactaatggaacaggttcattaatatttaaaaacttaacttatggaaattatacaatcagtgcagttttcacaaaagataactaccagacagttaatgtatctgaaaatgttgaaataaactccatcaaaacagttttagaagcagaaaatgttgtaatgtattataaagacggcacaagatttgcagttgtcctgagagatatttacggcaatccgttagctaatatgaatgtaaccatttcaataaacggcagaaactatgttaaacaaagcgatgaaaatggtactgcttctttaggccttaatttggagagtaaaaattatactgttgttaccacatttggcggaaattccaaatacttcggaacccgttcaaacaatacagtatctattttatcaacacttatcagtaaggatatagttaaatactacagaaacggtacacagttctatgcaactgttctggatttcaagggaaatccgttagccaatacaactgttatgtttaatataaatggtgtattctacaataaaaccactgatgaaaatggtactgctaaattaaatatctggctaaggcctggaaaatatattattacaatatttaatttggttactggtgaacaggcaggcaataatgtcactgtattgtctaaaattgttgaaaattatgacctggttaaatactataaaaatgcttcaaaattctcagttaaaatcttagacagtcagggatatcctgttgaaggaactattgtaacattcaacatcaacggtgtattttactacaaagaaactgatgcaaatggtatagccagtttagctattaatttaagacctggaaaatatgtaattactactatgtatggtcagtatgatgtaggaaacaatgttactgttctgccgacattacaaactagcgatttaaaaatgaagtatcttgatggttcagcattcaatgcaagagttgtagacggtcagggaaatccattagctaatcagattgttacatttaatgtaaatggtgtgttctataataaagttacaaatgatgagggtattgcatccttaaacattaggctaatgaaaggggaatacatcattacttcaatatacaatggatttgaaaccggaaatacaattaaaattcaataa

SEQ ID NO: 94 - protein, 1434 aa, Methanobrevibacter smithii
MIVPSAFASDAVDNQTVISSDEQIEISAVDDGGVIYSHGEDTNVLTGSNDIYFNASAESDGRGTQSSPYKYLQYNRLTSGCTAHFADGTYELDSKKGIYSSMTFMGQSAQNTIIKFNGIAFNVGDGYTLTLKDLTLDHATVKNLGTVSATNVIFKNGVAVDDTSYGYDNAYGGAIYNYVSTDYYGYVTNVPKNTLYNCTFLNNSAMYGGAIYLPYGELSLSNCKFINNSAHWFGGAIASDKDSKISVVGTVFENCRSVDDAGGAIYAFSTDLEVRDSTFNNCSANFAGAICSLNSEILISYSNFTNNLARYEGGAVYKMYGSGTVIKSNFTKNAALNGGALFSDNCTSFEIKNSEFASNAATGFGGAIFSNANPKLTVDGVTFTDNKASYNANMLNQSNFSPIVSSTNNYSLFVYKSLFNGTLPARYNLAENGFVTDVKNQQDSGNCWAFAALASLETCVLKASNKTFNFSVENMKNLIEMYSAYGWKMETNEGGYNGMPMGYLASWLGPVNATLDPFDDKGTLSPLLDSEMHIQNIYVLPARTSYTDNDAIKEAILKYGGLYASYYHSAGYLNSKTNAYYDPYTGNGNHAITVVGWDDDYSKNNFYTAPAGDGAFIVKNSWGSSWGDNGYFYISYYDRVLFAVNKDNQAFTYILNDTVRYTKNYQYDVAGMTDYLITGKKTVWYKNIYNATGNEAIAAVSTFFNTTVDYEISIYVNDVLQLTQNGRHEGSGYYTIPLKEYVPVAVGDIFKIVVKLANPQNGYAAVPISEQLSTTRCYYAPGVSYFSNDGKKWTDLYDYSASAYSHTYNSQVACLKAFTVADMQNTTVTLNNIAPKVQEFSEIIATVTDGKGKMAKIGEVIFSINGTNYTAGVVDGVAKINVYFDEVGDYVISANYKNNGLYNGSFVQKTVSVTKTDVNLTAYIGDIVYGENPIVSINVTSVAGVNVTGDVVLTISGKKYIVNVVNALAVFEIPEMLDAGEYHIDVSYLGSEKYNTADGTADFTVAKKEITMNVTIDKDYRDITVNVNLSEKLDGNLTVLVNNTPYTLSYTNGTGSLIFKNLTYGNYTISAVFTKDNYQTVNVSENVEINSIKTVLEAENVVMYYKDGTRFAVVLRDIYGNPLANMNVTISINGRNYVKQSDENGTASLGLNLESKNYTVVTTFGGNSKYFGTRSNNTVSILSTLISKDIVKYYRNGTQFYATVLDFKGNPLANTTVMFNINGVFYNKTTDENGTAKLNIWLRPGKYIITIFNLVTGEQAGNNVTVLSKIVENYDLVKYYKNASKFSVKILDSQGYPVEGTIVTFNINGVFYYKETDANGIASLAINLRPGKYVITTMYGQYDVGNNVTVLPTLQTSDLKMKYLDGSAFNARVVDGQGNPLANQIVTFNVNGVFYNKVTNDEGIASLNIRLMKGEYIITSIYNGFETGNTIKIQ

SEQ ID NO: 95 - DNA, 471 bp, Methanobrevibacter smithii
ttggggattgtatttatatcagttatttgcatagatactcatgaaagcaccggcttcagtgtaaaatcatcagacactcttaaagacggtgatgcatacagtgtagagttatgtgactccaaaggaaatccgatagctaatcagaacatttccatttcatttggatcaaattcctttaaccttacaactgatgaaaatggaatagctgtcctgaaaaccagcaatgttcctgcaggagagtatggcattaaaatcaggtatgaaataaacattcaccataaaaatacttcagctgctcatcatacttttatcctgaaaaccggagaaacccaaagtttagatgaaattcttcaaagaaaaaaatacagaattgttgaatacaattatatgggagacatggaatctgcactggttgaagattcaaatggtaaaaaatggataatgggcggagacgggtttacatctgtttaa

SEQ ID NO: 96 - protein, 156 aa, Methanobrevibacter smithii
MGIVFISVICIDTHESTGFSVKSSDTLKDGDAYSVELCDSKGNPIANQNISISFGSNSFNLTTDENGIAVLKTSNVPAGEYGIKIRYEINIHHKNTSAAHHTFILKTGETQSLDEILQRKKYRIVEYNYMGDMESALVEDSNGKKWIMGGDGFTSV
